United States Patent Application Publication US 2010/0304987 A1 - sequence listing, part 2

SEQ ID NO: 43 - DNA, 438366 bp, Homo sapiens
aggggccccttagatgtcttcctccggattttttgttaagcttttcctagacagtttacagaaggctttgggtagagaaagcactagttagacaaaagcagcccccctcccaccttgtgggcatgaagagtccagaggacaccacctgagaagcttttcaactgccttccaaggctcccttgaacttcactgcggtagagcagggaccccagaccccccctcaaatcgaagcttggaaggaggtgctctaggctgaatctgacctcccaggacccgaggaggcaagcagatggcaccccttggaaagtagcagtgcaggctggctagaggcctgggcggtgagctaggactatggggcaccgtggggacacgcccggaggctgcaccagggcaagcgggggagggggggggcgtccactgcacctgcaaatcccgcgcctcatcttggcccccctgcaaccccgcggtgaagcccacgccggagaggctgcctgcggggctgcagtggagagggggtctgcggccgcgaggagggaggcggcgagccaggctggggaggggggcgcggctggcgacggtgctgtccagggggaggcgggcggagggaaggcgctgccgctgctgccgccgcctcgcccgaagcgacacagacgctgggagcggccgaggcggtgagtcgcagcgccttccctccgcttctcgggagccagagcggagtcggagttgcagccggggcgggtgtgccgggggcggctgctgggggggacccgtgcgctcggtgcgccgcgggcgcaggggtgggttcgaggagcgcgcggttctgggaacctggttccagcagctccctcctgggtgcagttcaccctgtcaattcctctgtcattcccccagtgcctctgagggaaaacaaaacaaaattacagaccttgagggtgggcggcagaaaaggagagagcaactttgcagagggccgcgcagaggcgcgtggggccggcgggatggggcgcgctgggcagaagggggcgttggtgagcctggcggcccggggacctctggagcatcccgccccgggggccggggccggggccgggggccggggcacccgctggatcccgggcctgcggagtctgcccggaaaggccacaggaggcgagtgcggggcgtgggcgtctggggagggggccaagggagaggccgaaaggcgctggttgaacacggacgaggaagtggtctgcattttggactcaggacctgaaagattcgtgtcccttgcgctcgaggacttgggaagggtgtgctggggagatgtgtttgagtgtttttcagtgcataccgatttatttttagctcccagagaagcaggatgtgcaaagtgggttgtatcagcccgggaggggcaggaggtctccctgtccgcaggaaatacacaagttttttttttttttttctaatgctgcagatgcttgctttaacttttgtgcatggagaaagaatgccatttggctctgcagagctcctgccagggtcagtttcttcctgcgggtctgtcggaggccgcaggcgaggcggctggtgtgctgctgtgcttacacgctagccccgcaagaaggtctatgttctgttccgtagggcagctacggtgaaacacagaagtaggcagccaaggtctcactctctcagaaggaaaccacacaagctcgctcaaagttttcctacttctggctgatttgaaaataacagacctaagccactgtattaccaagagcagagtttgctgtcaggggtttctcagacctaagtggaaatgcttgtgaggtttttcactccaattgggagatccccgtgttttatggccaaaggccttgatgcagactacaaaggagagggggtgtggtgtgatggtgggagtgtgggtacttgcggtagcggggcaaggacagatctggggaggaggctcaagaaactgaaattcacatgtttacctacccaagccagatctctggaaattgtcctggagtctcccctgtctcaaccattcagtgtccagtcctgtagaccctctgtctgtaactgtattaggagagttgccaatatggacattaggagtgtgggctctgcagccagacagccgggtttgagctgtggctcattcgtcaatagctcctggatcttggggtccttacttaacctctactgtgttttctgatgtgaggcatgaggttgataatagataacaaagctatctcagggttactgtgaagataaaatgagttaatacccagaaagcactaagcatcatgccttgttgtaagtgctgcataaatgtgagctcttattatttttgttgttgttgctatacgccctcttctctcagttcctgctgtcactgacttagttcatattctcagcacttcttgcctgaattgttccaattgcttttgagcttgttgttcccaatcaggaccgtcttactccagtccattctccaaactgtggacactcattccaaaaacaaaaatctaagccagtcattctgcttaatttcctttagaggttttctgtggttttcaggatagaattcacactccagggactttcacggtcccacccttctctcttcattaacctcatctcccaagcctccccccacgtagcctctgctcaagccactgagtcgcagcatctatcatctccccaaccttccttgtctggtcaactcctatgcattcttggcagctcagctgctgcgacactgccttccagcaggctgcatggcactccccctcccagaggtgccatgctaccctggatgtagccctcgcatcattctgcaccattatctatgtatctttctatgtacattatctatgtatctatgtatcaaggcacctgcatgtgccttgagagatggattctgattgtaggtacatgtttgttgaatgaataaacaaacatcagtcaaacaaaatccagtccttttcactaaagccagaatcaaacacagagaataatagacagagaggaggaccaaaccaagctttatatctaacactctacgataaaaaaccttgggaaatactaaggaatcaagagttggtcaaaagaaatgtggcatactgtcttgaaactgatgggatccttgccctcgaggtgtgtccttttaatggtgaggggcagactaacaatgaagaaatgtaacgatctgaacccttctctttccttacttctctcatgaaaaggtcaggcatctcagatgtggctgtaggggatggaggtccaattttttgaaagggttgtgcagtgaatttggttctggaggcagaggtgaagtttataacacacatgggttttatagcttttccttgaattatgtatagcatccctcagaatgtgaatttcagattgcctggtattggtatgataacaggaaatctgcagtcaccaaagctcttttgttactttttggactattcagtatgttcagagggtacttttctgactcaggcacccactccaagctctccaactcctggggtcccaggaagttgcacgggaagataagagctgctgcttccctgaggcagccccagagtctggcttcaaagctctagagaagggatttttgtacaaccgagagcaaagaatgagctttatatttttaaagcgttgtaaacaaaaacacaacacaacacaacaaaacacggagaagaatatgtgatagggaccatgtctaaaatacttactacttagctccttataggaaaattttgccaactgttgcaatgaagctgagacatattggtttcatattgcacatcatctgactggctgcctggaaatctgggtccagtaggaatccaaggctgggtctgggctcagcaagaaagtgtgctgtggtcaactagtgatgtctgtctgctagggaatgggattagggaatagtctttaccattcctatcctagagaatatcatttgcggataatgaagacagaaatcagggatagagcacatgagttaaaagtccctagaaggcaggaactttctaccacaacaatgaacaatcactgcagttaacattgatattggcatttattgagtgtgtactatgtggccctggtttacatggaatacctcatttaacatttatgataatttttcaggagatattttacttaggactcaattctgttgtgtcaggaaccccaacattcaaactgttttagcaaaaaaggaatgttattttggctctgataactcctcagtccagaggaagacatttcggatatggcctgattcaggcctcaaacattgttagcgggacctcatttctctatttttctcagcttgctttcatggagtcggcaccatttttagtaccatctcattgaggccccatctcgttgtaggatggctggaagagctccagaccttacatagtctgggctttaaatccagccagaaagtggaagtctccatcccggcattgctcacaatgacttactctggctcgtcagcattgattgggtcctgtgtctattcctgtgaccagggtgccacatgttactaggcttgggcttcatcacatgtcacatgtttcatccttagagacgggctgagaaataggagcaggggtgtttcttcagcagaaaattgttatactctcaccaagagatgagcccctggattttggattgcaaagcaacagatgttcactataggactgttagcattccctcttcatagataagagaaacagcgttagaagcacgcaataatttgctcaaggtcacatggtcagtaaatagtggagttctcatctgaaatccacaatttatgcacttagtagaattacttgtgaacagagtatttaaagtgagtttagtgagcttagtgtgaagctctagcctctctattcctgcaagtatagctatataacttcaagaaattttaagttctgactggctagaagacatgagaaaaatgacatagacgtctctgcctggatttttactcaactatttgaccaatattcttgagcagtttctacatgctcagcattctgttaggttgtagggatacaggctgaataagatctagtcccctgtctttaggaatttatattctaatgtgaaagtgcaagacataattagggaagggattgactagaatctggagcaggtaggggaatgtgcaggaggtaagttcccttcctggggatggtggtcttgcattttgtttcctgaggcagccccagtacagtgctttgtgccataggcaagcaataaatatttcttgaatacaaccttttaaaaaactgtggttaaatatacataacataaaattgaccattttaaccattcttaaacgtacagttcagtggctttaaatacattcacattattgtgcaaccatcaccaccatccatctccagaacttcttcatcctgcccagctgaaactctgtttccactaaacactaacttcctatctcctcctcccttccaacctctggcaaccactattctactttctgtctctatgaattgactactctaggtacctcatataaaaggtatttgtcttttttgtgactggcctatttcacttataataatgtccccagagatcatccgtgttgtaacatgggcagaatttctttcctttttaaggtggaatactgttccattgtatgtatgtaccacactttgtttatccatgcatctgctgatggacgtttgggttgcttccatcttttggctactgtgaaaacactgctgtgaatatgggtgtacagtgatatgttcaactccctgttttcagttcttctgggtatatacccagaagtggaaatgctgagttatatggcaattctgtgtttaagttttggaggaacatccactgttttccacggtggtaccatttaacatacccaccagcaatgcacaaggattccatcaacacttgttattttctgttttttcttttaatataatagccatgctagtaggtgtgaaatgttgaacacattcttgaaggtaggttggaattgaattgtgagaaatagtggtagagtttaaacttcattctagggtcatggggaaccattggatatttgttgcctgtgataatggcatgatcggaaggtttggacgttagagagggggtggggagaagaggaaagcagcagagaagttattttaattatttagatgagagaacataatagttttccccacatctgtacaactgaaaatatgtctatctctagtaaatggtactgaacttggggaggaaatgtaaatacggcatcgagagatctcatggcccaggattcctcacagaagtagactactgttgctaataatagcactcatgctagcaaatgcctaaaggcgattcaagtattgattaattctgctaaatcctatgaaagattcctcctccagcatcccataaggaggcggatgaactgctcagaaggcagtaactgaggaaagttaatgaagggactatttacaaaggtgcgggtaagatcagggaacccaccagaagtggccagcagtgcatgcaagccttcactacccagccctgacagcatgaggtgagagagcagtttctggagttgttcaggggacagggctgctggctggagctgtggttttcagtagaggaatatgactactgcccattgtggcctggtggggaggcatccaggtggataaaggccccagccactctcttccactctctgatctggtgctggtgcctcccaattggccaaactagccacagccagacagcaagaaggcctgttgatgtgggactatcttgtagtccatagtagccaacacaaagtagtgttctaattatccccaatttacaggtaagtgaaccgaggcattgagaggttgaatgatttaccaacattgggagctagtgcaggttatggagctgaaatctgaagactgacaaataatcagagatcatcagcacatttcttctgtatatgcagctggatctggaaggttacgttttccccaacctgtgtgttttggttctttggaaataatctgatgtgtacaaacttggcttggctgtcaataggtggtgtgggtgcctgctcagatcccccactttttacaaaaataatgtactttgcaggcatatttcatacttgattcattgtgtttagataaaaagaatattttccatatacttgatgggagtgacaacatgtccttgaatcacatttgctacacatgaaaaagatgtaagttgcgttttttttttttttgagttgaaagtgccaacggagttgacagtgtcacctggctgtttaaacattagtgagaccttgggctgcaataagagaatactgttcaaaggaagggagaggatcgttccctctgtgctgccctgactggtacaagttaaggggatttctcatgagctggcggatgccgaggacagtagctgggactctctggcctggaatcgctctgtgggacttttatattcttttcttcacatacatgaaagcactgtactgagggaaagggattagactcatctggggccagaactaggcctactgtgaacacggaatgggctgctttggaaggcttcatatagtccctggccggagattgtgaagctgaggccacaggtgagagatggggctgtaagcttatatttgtttcctgtggccgctgaaacaaatgaccacaaaatggtggttgaatgcaacagatatttatcctctcacggctccggaggctagaagtctgaggccgaaatgccgtgcttcctccagggattctaggggcgacttcatcctttgcctcttttagcttctggtagctgcagcattcttgggcatgaggttgcatcactagagctgcgctgcacgtcacattgcttcctgctcttctctgtgtgtctctcctctgcgcatcttttataaagacatttgtcactggatttagaacccagctgcgtgatccagaatgattttatttcaagatcctttatgacatctgcaaagaccctttttccaaataaggtcatattcactggttccgggggttaaagcttggttatggccaggcccagtggctcatgtctgtaatcccagcactttgggaggtcgaggcaggaggattgcttgagcccaggagttcaaaaacagcctggccaacaaggtgagaccccatctctaccaaaaaataaataaatagataaaaataagtaaaagaaaaaaaattaggcctcttggcatgcacccgtggttccagctactcgggaggctgaggtaggagaatctcttgggcccgggaggtggaggcggcagtgagccatgttgaccccactgcactccagcctgggtgacagagcgataccttgtctcaaaacaacaacaccaccaccctacaaaagaaacccaaaaaagtcttggacacttggacatactttttttgggggtcaccaccattcaatccatgacagagctcagtagttaggatacacggcaactatggattctctgactctgttacggtgcccctagatttgatttactgtctggattctaggttccttgacacacagtagaggtttttgtttttgtttgtttttgtttttgtttttgtttattatactttaagttctagggtacatgtgcacaacgtgcaggtttgttacatatgtatacatgtgccatgttgctgtgctgcacccattaactcatcatttacattaggtatatctcctaatgctatccctcccgcctccccccaccctacgacaggccccggtgtgtgatgttccccttctgacacagtagaggttttctaaatgcttttgatttgatcatttgcaactttattctaactttaaacaacaaaataaacaaacacttaaaatctaccgtcctttacttctgaaataaaggggtgtgaaagaggctgtcagaagccagtttgatccctgtctcagctaaacgttttctgggctttgctttgctggatggcattgaaggaaatgaatgggaaaaagagctgccactggtcctgttcaggcttctcacctggggctttcccagatgcttttagaaatataatttctcagaggaaggctaaggatgctggagtctttcaggaaagggaagcagaagcagcagagactcaagtttctaagcccatgcttcaggaagcatccactacaaatattgtttgtgaatgccattgacccatccgcacgtcttttatttatgtattttcaacagtgagccccaaagtagggcctgtgtacatcgggcacataaggcaaggtaaagagtagctttggcaatggcctggagaattcgatgactgtagtccatcaaatgaggtgtatcagaaaagtccactccagggcatcaattattctgttttattgtctgcattgatcgcattaactggggaagagccaaaatccattcagtctgtgctatggagtagcaggtgtaattaaggtcagtttctctctagggggcagctaattttggtttctcagctgctttacagtttgactttaaaagagaggaaggaaagaaaaaaaggtaaagtgccccttcatgttaccatcttacctatcctactgtatcattgttactctggttaatattaactttggatccttttgctttaacagtgtatcggaatactgtgatacttacagaatttagtctcactacctgaagaaaaggtttgccttgcaggggaccaactacacagtttgtggggctcacaacaaaatgaaagtgtgggaactttgtttaaaaaaattaagaatttgaagatggtgctagtggaggattaatgccagcatggggccctgctgagtatggggcctgtgtgatggcacaggtcacatgctcatgaaactggccctggctttgtgcatatgctgaggatggtgtccttttacctacctggcaccttaactcccaaagagtgaccaggccagtttcctctgccttggttggagcacagctcttctgtagggcaagggcagtaagaggcctggatatctcctgttggcccttccacatccctggctcccttctccacctggctctgtgccccaagaggtgatctttaccactggcgtcaatggccatcttttcttctgacttctggtataatttggccagaaatcagcaggagacgggagggtgggaggagagtgaggtagggtatttattcccctgtccctccactgggttgcaagctgcagcttggtgtgtgtgtgctaaagaccacagcgcctgcagctatcctctccatatcgccaccctctttgggttccttcagccacttcctcccctcatgccttcaggcctagggtggtcatggcttcctgctattactagccttagagtcctgcatcatccttcattgctttcctgaacccctgtatgactttcttctcaatagcctcttcagtaggactcctctgtaggattcaagagcagcctctttagttttctggttgggctttaactgatttggtaacccttggacagagtttggccacagcttgctctgctgcagggcagaaagagagaagctgatggctgtgataacacgtgactctgctgggccagctcctggtagggatgggtgatcagaaggcagtacctccacatctacagtggtggagaacgtatgtttgagagctagacatttgaattctctggcctgactttggggaagtcatctcatccataaaatgagcgaatgacagcccttcacttacagggctgttttgagcatgaagcgagatcacgtgggcatcatgcttgtcatagtgcctggcacacaggaagtgctcgagaagcattgctgcttttagcattagttctacggagtgacccccttgaggggatacactcgctactcttctctgatctgaactaaggcactgacagcctagactacaccaatgattatcaagttttcactgattcacggttgtttggggtgctatttctgtcttttcaagtagattgttctgaaattgttcttatcttacataccttttaaaaaactaatataagtgcccaacccagtaggtagcacatcataactggccaagaaatgtttcttggctaaatataagacgactacataatttattgttcacattgggacatttttgagagtgaaaggggaggactttccagtaattacagcaaaacagcaggcacaaatggggactgtcctaggcaatccaggtaaagaaacatagttattctacttaagtgggacttaaggcagttttcaaaatacatttttaaaatttgccggcctaccatattttgtattcgtctgcctttggtttatgaaataaaaacatgagatttgaaaaacataggcaaaaatatgtttaacacttctaatagattcttggcctgaatttgaggcaatgggccagggcctcttatcagatagagacctacttttacactttgttaccctgctttacactaggtacctatttataaactttcttctgtgcctgcttttaaaaaagataatctcctaattattgtctttcttgctatagtgatcatttatgcttaaagatggcaaaaatagatttatatacatgtgttttttggaacatctttgtctttgtatttctggttgcctgggtgacatttccaagagaatatgtgctaatctgctattactgaaacagagataaggtggaaactatttttaggtctgtctatacctttccttttctctcctagaccacttaattggtttatttttttctgtttccattgtttgaagggcattcatagcttctgtcttggtccattttgcgttgctataatggaataagtgagactgggtaatttataaagaaaaaaggtttatttggcttataattctgatgtctgtaaaaattcaagattgggcatctggtgagagcctcaggctgcttccattcatgatggaaagtgaagaggagctggcacgtgcagagatcacatggccagagaggaagcaaggggagggggaggtgccaggctcttaataatcagctctccactgaactaatagagtgagaactcacttacctccctcctccacccagggagggcattaatctattcatgaggcacccacccccacgacccaagcaccttccattaagtcccacctccaacaatggggatcagatttcaacataagatttggtggagacaaacaaccttatttaaactatagcagcttccttcctgtagttctaatttggggactggataacttttttgaaaactgatgtagtcattcagtatcttcttcattcacaatagctaaatgtgtattgatagccaatttgtttggttagttgataacaatttttttttttatcacagtttgtctaaaacaagcttaggcaagggatatttttggtataaaaaaagaatgtggaggcaatctgttgttctctgctggaaaaagcacatcccttctggagctggattaatccggttttggtcttagtattgccacttattagctgtgaggcccctggagcttgtatcttcaggtgacaacggaagcaataatagtacctgccttatggggttactgtgagggttgagagggttaagtagaataacacatgcaaggagaagatgcagcatctcaccaatagaagtgctgatgctgctgttcttaataccagaggtacaggtgcaccctacctttcagaaaataatctcatacaaggtatcacaaatatttgaatttcctaaagagataaattagggagatcattattttctttactaaaatgtttttgtttttataaacatttcaaagaatttctttcagtggtgaacatccttgggtgtgtttatagtaatattgaaattaaaaagttctaatttaccctagcagttttaggcacataactgtagtgttatcacccataattcaaatgttcaaaggcagccagagttaatatttggggtcttttcttcccctatttttacgtaaagatttttgtgaagatgtatgtatcatttatgtgtgatacataactgtagtgttatgtaagagattttgaacatttatttgactgttgcatgtgcttggaggggagatatttagcctaattccaatatttgagatagggccttaaatactgcagttagagatccgagatgagtaatttggattatatggcaagtttgagaggagagatggactttaacgtgttgttatttaaaactttttaatattggggtgttgctctggctggggttcctttggctctcactcttttgcgttgttattgtatttttaaaggcagattgctgcaccattgctctggagtttgtcttgctgcccttgaggataggggaaggagagaggaagcaacactcagacacacatgtgcacaccacacacacacacacacacacacacacacatctctttagacatatgatctaaattttctcagttgttggaagtggaggctggggatgtgggaagtcagtgatgttgagttcccaccgcctcaccctttggaagccatgatgaccatttccatgccaggccaaaggacaagcagtgagaaccagaagtccattctagcctctgaagtttcttgggaaagcaacaggaagacatttaaagaatatgttccctggacctttggtgctgttccctctgtatcattgtcctcacaattatcaaagtaagatattataaaataaaataaaatatgcacaatatagaaaattagaaagaagaaagaatcactcttgttccaaatattcaaaggcatcctggagtatttattatcattacttaatatagagtttttttcttagttatgtagtcatatttatctattttttaaattatttttttcatttaaccatacgtcccaaacattttatcttttattctgcaatctttgtagacaatgttttattgcatatgtaatatttcattgaatggattatacctcagtttacttagtcattctatttttggtcatttggtcaacattttattatacattttttgctattattatttctgtacgataacctttttctccttttaacattatatcctaggatatagttttagtgaatttaatagattgaaggtttgaacatttaaaaagtcttaacacatttttagcaaaagccaatttacttttccgaatgggttagagcaattcatgttgtgagactgtgtcgatttcatcttcttttaccatgcattgaccatcatcacttcaaaatactttcactaactaatctaagtgcccagcctagtaggtagcacatcataactggccaagaaatatttcttggctaaatctagggtgactatataatttattgttcacatcaggacagttttgagagtgaaagtggagtgctttctaataattacagcaaaacgacaggcagaaatagggactgtcctaagcaatccaaaatactttcttttcatttgtatttctttgatgactagtgaggctgaacatttcttttttatattattatatactagttgcatttcttctcttcctaattttcagttacatgttctttaccatttgatgtttttcatatcagttaaaatgaaaaaaattttccttcaaattttaaaagtaatatatggttgtgataacaagagaaacaattcaggacaaagatccacaaagaaaaagctctgatggctcgtttcctcttccagggagccagtgttaaaggtctgggtgtttccctacctttctccacaaggagacctttacaagatctgggtgtaattcagatgaaatattatatatgcaataaaacattgtctacaaagattgcagaataaaagataaaatgtttgggacgtagggttaagtgaaaaaataatttagaaaattgataaatatgactacataactaagaaaaaaactctatattaagtaatgataataaatactccaggatgcctttgaatgtttgaaataagagtgattctttcttctttctaattttctatattgtgcatattttattttactttatagtatcttgtatttatgtgtgcacacaaatacacttcatttcaaagatacaaagggggcttgatattatgagtcatagtatacatattattctgtaacttgctttattttttgcttaaaatatatattgtggacataagatctttatcataataaaatgtctttggcacatttgttacaaatatttccccaaatattagtatatcacttgcccatttgacatagtttgacactggcgagtgggcaaatgtttccctgaaatttattccactgatgggacagcctgctctgcactttgacagggtttgctactcagctttgctgtctgctggttttaaaaaattcttaactttcaaaaaaatcattatttaatccaactataatttatttttgtgtaggatgaggaggaaataaggggccaaactgattgcttttctcctttaacttactgatgaattgtcccatcaccctttatagaattaggcttaaaaaaaaaaaacctttcatttccataaagcaagttataccttttatgtgtacatttttttcagctataaactagtggtttatagctaataaaccaaataatcaggagagtatttttctaagggagggaagaatttgcatttacctggaattaggtagttacactgagaataacctgatttctcaggccccagatctttgccttgaacttgaatatcaggatgccatgggagtgtgcggtctgagaagctcagagtgcttctgctaacgatttcacattttcatcactcctgcattgctgtgaggtaggagggccacagatacgatctcattttacaggggacgaggctgagccaatctcaatgattcacgcatggttattcctgctttccaatccgatagttcattatattatgtaattctgtctgtttttctggtcgtccttctgattccctttcttagtgataaatctgtgtttgaaactgtaatcttggttagctactttgatcactataagtagaatcttaaaaagggagctcttccaggagcattattattattattcctatttaacaaacatttattgtgaacctgctctgtccaaggcactatgtcagatgtgggaaatacaaggtgaaaaaaacacttttcctctccttgaagaatttactaattactttagtattgttgtagctcctgctatcgtccttagacttttacaaaaggatatcaatattttgtgttgcatctactcggctgccttggttgcaatgacggaggatgttttctgtccagcaagtctcacgagtgcattgcgtgctgtttcctattcagagaactactgtgaggcatttaaaacacctgaggacttgaccgatgcatatttgataagctcaaatggtcttagagatcttcagtgtcagtgtcctctgtttctaaataactacacttttcagccccaacttctcttcctttgggcatttaggttactcgactggtcaaccaggatctaaaaataaacctagaaactttgagagtatttttccccccttggctgattgatgtgtgtttttgtgtatgccaaactgtgctgtgtaactatttacttttgcattatgtatagcacttagcaacccacagtggaaatgaaagctaagagcacaggcagtccccagctgaggcgggggagctggcctgcccaagtctcagccaagtctccttccctcccccatcctgtaccttgctggcctctagttcctgctttttgccttctctgctggcggccaagtggggaccaggagcaggggcaggaagggcccctcctgcccctactcttgccctttgagatttccctctgcaggtcagtgtgggtggggtgaggggaaggacacaggccttggccaccactggcgtcttggcattggtgacagtcctgtagggtcagaggcactgagacgctatgtcttatttggaactctaaatgcatttccataaaagaaggacacaagttgtggcaggaccctcaagacaaaactatgtgacttctcaggaatgctttctttagggtgacataagtcagtgcttacaatgttgctgttagaggagaatacattctaaattctgaacatttcaggttagaaagaaacttaggacacgatcagcttgtaactcaagggactgtctctaaagtcaaaaattggcttattcccacatgagaatgtccctttacttgggacttggtagtgtgctgaatgagctcagcccttctttccttagccctcttctgtagctgtaagaatactttagttctctgatttttagagtagcaattatactaaaaagttcataccttgattttaccagaagggtgggggaaaggccttgaggaatatagatttaattccttgattattgccttttagaaaagaatgccaaacaaaatgtatcagggccattgttaaagactcttacttttttccttaagaaatccaaatttgttcctttttaggactctcgtgtgcctcttattcataatgcattttggggaacagatttgaagaatatttctatgtgtatatatatatatatatatatatatatatatatatatatatatatgtacacacatatataggctgtagataaataattttttaaattaaaaagtttctttgcaagttgatttatatcatctttagtaaaatcagttttttttttaagggctggaaagcatacatcagcagttcagaatgattaaatagtacttacttggaaagggacaaagtctgtgaacttacttatgtggttttcacagaaggggacaaagcagtagaagaatcaaaaccctccagcctcaggtgaattttctttccaacctcagaaggggtgggcccacttgacacaggaagtgtcataggagagtggtttgagtaatgaaagaaagcttatggattgggcttagctgttgtctacataccgaaagacagaatggtctatagaaactctcctaattccacaacctctgcatttttttgcagagtgcatgcattacacacaggacacctcccctacaagaacaagaagctgcagaaatagctagagctatagactgcaatttaagaggaggccaagcttccagcagttgcagacaaagagagaactcttagaggctgtcatgtcagcccttgtatatgaaattaaccagccctgaaggttcagtgcaggaccctagaggatcagggcacgctgcaggataaggatgagaacagggatgtgtccacacatctgagacactttcctgtgctacgcacagctgtagtatatgtgtgtgtgtgtgtgtgtgtgtgtatatatatatatatatatatactatatgctaatagttttacacgtactgtgtaaaaatatatttatacttaactatttagaaaattgttgttccgccaggtatggtggctcacgcctataatcccagcactttgggaggctgaggctggaggatcacatgaggtcaggagtttgagaccagcctggccaacatggtgaaaccaccccccctactaaaaataccaaaaaaattagccaggcatgctggtgcacacctgtaattccagctacttgggaggcggaggcaggagaattgcttgaacctgggaggcagaagttgcactgagccgagattgcgccactgcactccagcctggttgacagcgtgaaactccatctcaaaaaaaaaaaaaattgttgttctagatgtgccctcttggtggtaaaggactaggatgtcactcaaactaatttgagtaacggaggttcttgtagcaatgactactactctcattgattcagacctcactatgtgccagacactgttccgagtatattatctcacggaatcttctcgcccatcctgggaggtagtgtgttattattcccattttactatggaggagcaggcatagaggatgttctctaaggcaggtgtgtgcgaagtgggagtcaggagtcgcacccagcaggtcactctggagccatgatttctaaccactattctagacctgttcctggaatagattccatgacagtgaatcaaagtacagctgggcctcatggggttcaaaacaagggactggaaaatcgggaatggagccattttctttctcagaggtcatgtggtctctgctcaattagcccctcttcttctgtcctatcttgtttctttatcttacgtatggcccctgaagggtcaaccaaacccataagtctgtaccatgagacttcaatttccctcagcatgtcctggcataaatctataagcaagagattcctattagtccagctcactgagaaaggcaacacaagctgttggagcccgggcagcaaaataattacctgcctttgtgttgctgtttatcttagtttcattggtggccatttccctgagcaggggattgtgggaaaggcagtgcacactggaatgggaagtggttcatagcaggaaattaacatctctggtacaaactcattttatactgtgataaacattttttgttatctttacaaagtttcaacttaaaagaatctgtatgtatctatagctatacagtctgtatctctttaggttacaaatgatagaaacctgattcaaagcggcttagaaaaaaaatcaaattaattggttcatgtgattgtaaaggcaaaggctggcccgtatcaaggtctcaagcaatattatcagaaatctatctcttggctctgtgttcctctggattgattttatcctcaggcacgtcctctctacattatatcgagataccatcagaagctccaggcttatctgttcgctgaacaatcccagcagagagcttctctttccccatagttactgcaaagttcccaggtttgattctcattgccctgaattggtttcatgcctattgttcaaccaaacatggcaggcaagctgattggtcaggcctgggtcattgtccatccctgggaaggggttaaatctccttccactccccacacatgcattgaagcacatggactgggaatgggggagtgtggtctcccgtgacaattgacatgttagtattacaagaaatgggaagggatactgtccatgcaaaaacaacccacatcgctactgaacatttgcaggtctattacaaataactggacagctgtaataaaggttttggggcccaggaaaagcagactggaccacaggctgattcttatgtgacaaatttaaagacctaggaaatcccaagtgcaggggtaggcctacatcctctgtggtttttttaggttataattctgaaagatgatgatattaagtcaaagaaaatggttattggatttgcaactttttgagaaaaacaatcacaggatggttttgtctttactttttgatcaagcagaaggataagacttgaagggctcttgctaggtgccccctatttgaaatctaagctgttctggcattaaaatgactttggtaaattacatacaggctttgtgtaaaccttcacagtgcctaggatttaaaacccagtttatttagctaatgattaaaatccccagtttatatatcgatgatcttaatactcactgggaaataattgcttggtttttaactatataatcaggaaccaagtatataatcagggacttgaagtcgtgtggaggttaaaccagcaagtcttcacgcgtgcggatatagtttgaggctacgcgacctcagatgttcagtagcagtttgtgtgtatgtgtttgtatgcgtatgcgtgtgtgtatttgtagatataactttgtactaacagaattgccgtgtctctttgcttactccacctgctacaatgatcccagatgtccattggaacaaattatcagcttattttgcctatcaaatttttcaggcagttgccttctcacttatttaaaaacttgtatttaagggattaaaaaagtcccctcatatgccaaaatgtttctcttctgttgattttcatgtaatgttgactttcatatttaacaattgttatttcttcgcatgctgttttgaggtttttcaattgcaaacaacagtgagataggcattgagggggtcagagtgcctcccagctactctagaggctgaggcagtaggattgcttgagcccatgaggtcaaggctgcagtgagctgtgactgcaccaccaccctccaggctgagtggcatagtaagaccatgtctcaaaaaaaagaaagaaaagagaagaaaagaaaacaaaaacaaccaacatgggctctagggtctgactgcctgggtttgaatcctggtggtgtcttgctagctgcgtcactatgggcaagttacttaaccctcctgagcctttatctctaatagttttatataattttcctaacactgtgcggtatggactgtcattattctctcttttaagagagaattgggtgttagggaaattatataaaactattagaactgtgcccatcctgtagtaagcaaacactcactaggtgttaacttattaataggatttgaacaggcagagaaagggtagagtgtgtttagggagaagagaggtggcaatcgttggcaagtacagtagaggggagggaaggcacggggacagctgggaggttggcgtggagctgagtccaccaaggttcctttcctctgagtctgtattttccacagagtctccccttactcatctggtttccccaaaaggacttcaaaacccaagagaagcatatctggatccacccgacaatatgtttcccaggatactcaagtaaagtggccttctggtttatcaatcagcgtcttgagcatttagttggcatgagttggtcccctagggtctcatcactcccgagtgaactgataaaatcaaattcctgcatgtgcagagctgaggaccaggccttggacctgtagtgacccctgaggggcacaagaattgggaggcccagctggaaaccgagagctcacccacccctctctctctcctctcccttgatcttgccattaaactttcataaatgcaacgaactgcatccgagacatccgctggggttgggcagagcctggtgtgcagaaggaggagctcaggaagtgcttcggcagtggaggaagaacgctcgctgctgctgaggcaatgggcagtggagcggggctggggggtcatgcctcggaagctgggctccgggttctgctccctttttccacttgctaggtgcctttggaaaaatcccttaactgagcctcagatacctcatctgtgcaataaataccaaatctgaaggcggaagactgctccatgtcctctggtgtccctgccagctctgacgcatgtgccataacaaggggacccccagcaagggttaggggtattagggcacaaaatgtttcctccctgtggaactcaaggggagctgcagggtagtttctgcctccgtctctgcgctaattgcttcacgtttgctttcctcgttgccgtatttgaaatgtgagctgtgttgttgggtggagcgttaattgtgacaggaggatggacacaatttttttttgtattacctgctgtgcccatcacaattctgagcattgaaaaggtgctcaatatacatttgttaaaatgaattgaatattattgcctagcaatcaatgaattacatcacattcttactcaaaagacattatgtgcttcatttacagtatagcaataataagaaaaacactacaaataaaattgattattttgaagaatagaggatgagttttaagagctatgagttctgtttcagagttgcatttacttagttacaactcatgttagtttgttataagatgctttattatttagaagtcattctcccacccccagcttcaactccataagatagaaaattaaaacattgattttgttttaaaattcaggctcccacacagccccatttgtaagagtgagaggtgttaatactgctaagttgcccttcatgtaatttggataaatgctgttcacatctttattattctaccctttcttcaaaggggcattcatttctagtctgagactaatgtgggaatctattacactggtcaataaatgaacagcctgttcttatacatacaagaattccaaaggctctcattttagccacacaaaaggaaaacaaaacacacacataaaacaccccatttccacttgttcaaagcttccgagaataaggttatggttgcgatatattcctaggccttcctttgtgaatgcatacagcaacacaatctggaaataattgcctgcacaagctaatactgttaggactcggctttctgccctggatccaatgcagccttcgtttatagagggctgctaattcaccactaaaccaggtagtccactagaggcctgcagacaccctttatttgacttgcagtgttttaaaaactttttaaaatttgttgctaacttaaaaaaaagaggatattttataaaaatgcggatttcaggcttctcctgaaaaatcataatatccacatataatactgggtccagttcctgcctgacagcaattggagagctgagtgatgcgtgttctctttagagaggacgcgtgcacactggtcctcacccttctgtctgtcacacatcctgactggcttcacgtgcccatatgtctgcctgctcctttaagcatttttgagggtttttgttgctggtcgtggtataaaatatgcaaaacataaactttaccattttaaccatttttaaatgtacagttcagtggcattaagtacattcacattattgtgcaaccatcaccaccatccatctccagaacttcttcatcttccccaactcaaactctgtaacttaccatcaaacaacaactccccacttcctcctccccacagcccctgacgaccaccgttctgctctatgaatttgactactctaggcacctcatataaatgaaatcatacaatatttgtccttctatgactggcttatttcacttaccataatgtcctcaaggttcacccatgttgtagcatgtgtcagaatttcctttctctttaaggttgaataatgtctcactgtatgtatatacctcgttttgtttatccactcatctgttggtgaacgtttgggttccttccacctattggctaatgtgaataatgctgccgtgaacatgtgtgtaaactctctgagtccctcaagcatttatgtttcttgacgattttctcaaaaatttcccagctctgctcttgtaactccagcttttgtttctctcagtggtgccccaaagcctaaacattccaggacttcagcttaaataattaacttttgaggaagcattgaaaaacattgaaaaagacatctcatgaaaatgacttggattctttaaaattgttaaaagtagttgctgtgggattttcaagatttaatgtcacattaataaaagaatctggatataacattttgtgatttattcctccttgagtttagttatgaaaagctcctatttgaggaagaaatttgcaatatatttgattgttttgatctgaacaaaacttgttcatcttggtttgtgtgctatgtatgctgaagaggccttttgttgtaagtgttgataaatgaggaatatgaaaataatttaggttttatttctgaattttcatgttgcattaagctaggaaaagtgtgatttttttttcagtgagtattaaatggaaaggacaaaacaaagtttttgctcttagttttcagagactgctatttctttttcttcttcttcttcttttttttttttttgagacagagtcttgctctgtcttactctgttgtccaggctggagtgcagtgatgcaatctcagctcactgcaacctctgtctcccgggttcaagtgattctcctgtctcagcctcctgagtagctgggattacaagtgtgcactgctttggtaatttttttggtaattttagtagagatagggtttttttgggtaattttagtagagatggggtttcaccatgttggccaggctggtctcaaactcctgacctcaggcaatccacccaccttggcctctgaaaatcctgggattataggcgtgagccacggtgcccagctgagagattgctatttctgatttttttttttttttattaatgacaacatcaacctaaatgtcattatctgacagaagcacatggcaattcaacttcattattgtgggaacaaaatcttgatgtcaagatttaaggatcaattgtatatcttgatatgggcatattgtctcttgataaggacttggctctccctgtttacttatgttaaaatgaatacatttaaatttcaagacatgtaggggaaatccctaaagttaagatctaacattcttgtctcatctaagtgtgttgcactttggaatgttcttttccacctgctccccattctctaaagatactgttagtgactgtgtgaaagaattctttcccttgacaagtctttggtgccttggactattggtgtagcatggattagtaaaggaggccatttttactactcaggactgttttgtttgcaggagacagatatctaactcaaattgcttagacaaaatagcttggataactgaacattccagagatggaattcagatccatttggatcaaggtatacaaagaatgttaggaacctgtctttctcacactttctacctcccatctctgctttcatctgtgttgaccgaattctcagttggttctctccaatagggaagccaacatggccatcaacagctccaggttcacaacaccctcacaattaacaagcttagaaaaaggaaaaaaacttctatagtagctctgacaaaattaccagtgagagatgaagtcagtgttgggttacatgctcatccctgagccaatcactgtggcaggggatgagtatcataagtggccaaacctagttcatgtggccatcatggtacaagaaactgaggagtggctggttaaattccaagtgtttgggagggcagggtctggtgccctccctcctcatagggaaggcagggtctgatgtctgaagaagaaaaaagatgcttcaaaactctcttaggggaaagaccagttttattcatccttgtttcttttagggtgaatgacacgaggcctaccaaagttgctcaattatggttgctgattaaatgaatgtataaggagtgatttaagagagtttaattgaagaattatttctatggggtcagcaaggttaagggaaaccagtgagggatgatgcagccccccagggccagcaacttgggaagctgttagaatcctcaggccagaagaggccggggaggaagagttccttgagaaaggattagctggagagggaagactggcaggagctgagcctggggttagaggaatgcaccattgtcaaactggggcctggtgaggaggaaatggggaggataaataccccaattgctctctcatcccaccctccaccctctgcagtccttcccattaccccagcccatctagaagccagaggtaaggggacatagttaatttagcacatgaagatcagtctccagggatctggatgggcaactggaggtcatcccaatcttctttctcactctcagttctcttttgacttagtcctaaagcatatcttggatgtattcacgccccacccaccacctttcatacccaaacacagactatacttattttactgcctcatgccacatgccctttgcaggggcacagagatggctgtgcaggaagtgccttgcacattgtgtgaatgacgtcttctgaaactgtcgattcacagcgtgttctgtggcctggcctttgcattgcgttgtgatttgtgttggctgctggtgagggtgggagagttcaaggaaataagaaacagatagggtgaaggcttgtcatgtcatcatttaaaattaggaaataatggcctgtttagtttcaggggtgaaactctgatttctcaggttatcagagagatgctgtcagagcagagagcaggaagaccaaggtttcagtgctaaaaatgatgaaatcagttgataagagtcttgtataaggaggtacttttgaaaagaggttattgatgattgccagagagggatgctaacaagtaagcaatatccagcttcatggaggcatccagaactgctggccttgggcttcatgacccacgcaacttctgatgaaacagcatctacatgtctcaccgggaagggatctggaataaatatcttatgatgagccacagagcaagccacacagcacaaagccaaaagcaagtaataatatggtcaccatgcacttaagcacccgcgtggttggaactgggtgtgggggactttggttgtgagtaaggaccctggctcacaggcttgttgtgcagatgcatgaaataataggtggaaaatgctcacagactatcaagtgcagtgtgaatgttagatgccatgaatgaactgattctttgtctttcactatttttttttctcctgtgctagttcctctgtggttcctaactgttagtctcactttttaaaaatgtttaggctgtgggacttaggtaaacgaatactatgaaatgtaggtaagctatctgggaactggtggtcttcttaaacctctaacatacatgacttctggtgatgctcatgttttcagggctgtaattgtatttcccagaagtcatccactatgtttagtatctttccccttaaaattcttgtgttgaagtcttaggcccccagtacctcagaatgtgactatatttgaagatagggtctttaaagaggtaattacggtaaaatgaggtcatcttgttaccagtggagggtgtccaggttcttggcattttgaacaaataattggacaaaatgcacaaagcagggaaagaatgaagcgacaaaagcagagatttattgaaaacaaaagcacactctacagggtgggagtgggccccagcacaggggctcaagagcccagatacagaatcttcctgagtccaaataccctctaggggtttcccattgaccacttggtgctcacctcatgtaaatgaagtggtggcccgccgtcagtctaattggttgcagaaagcaatcaaccagaggctgaagtgaagttccaaaggtcacactcctatgcaaatgtctgattggttgcaaaaatcaaccaatcagaggtactttcaatttcccatctgctgtgcagaaaaggtgggggtttgcaaagggagtagtctctggtccttttgttacttaggctggaaagttaggattttcctttcaattcagttctaggaagtcagcatgaaatggtcttaggttccctgcctccagaccctattttcctgcctcaatcctggtgggccctgatccaatactggtgtccttatcggaagaggagattaggacacagatacacacaggggagacaacgtgaagacacagggagaggaaggccacctacagtcaagagagaggccttagaagaaaccaaccctgtggttgtgagaagccagtgtgagtgctcttgaaaactgatctttgctcttcagcctgctggccttgttttagcctcatcccttggaccagtatttaccctataagattcttctttgaacttaccttttggatctttggatcagttttctgccctttagtgcctgctcatgtgaccatgctcttcattattagaggcagggggacaaatgttcaggtttacccaggcctggggagattcctgggatgcaggacctttagggctaaacctgggatgttcctaggtaaactggaatgagttgttcaccttgataagagagaagctttggcaagatttatttattttggcttactggctttgttgaaaggtgactagtctaacaggatgttataactattgttacaattattgtctttgaaatgtttatacacatacatttagaaactattttgaaatgggtgcttccaccatgaggtaagccaaataatgaaaaaaccatcttcagatacctttcacttccattatctcctacttagtttcattttaacaagaatactgtcttggcttgggtttctattattaataatttcatacatttcagggtgtacacgttgagtaattatctccccaatgcttctaagcattcgtgtcagttaactgaaccttttaatgaacccactaacaatgtccttggcattgtataaaatataaaattggagccagtccctagtcaatgggttttagctggtccgagcctaacagatgctcaaaatcaaaacacaggtccaagttggtttaccttttatggcctcattttgggcaattggaaaaaaatgaggtgttcagttctttagatcaagtaatgagggctcctgcctcaccatcagaacacgtgttctttattcacatctcactggcccagctcagttctttagcacaagccacccaccacatgtggtcctgcctccctcactccatctgccaccctctatctctcgcacccttctcagtgtcttcctggatggggcaggaggaagtattggacacattcccagctccatttgaccatagtaccacccccatatcatgtgacatgggcctcactttatactcaacaaaacatacgttattgctaaagccaaggcaggctgaagtccaagctaacttttctgttagttttccagggctactgcaacaaattagaacaaattgagtggcataaaacaacagaattgtattcctttacagttctctggaggttagaagcctgcaatcaagatgccagctgggccctgttccctccaatggctctaggggagactcttctcttgcatctccctagcttcttgtggtttccagcaatcgtttgtgttccctgtcgtgtggacacatcactccaatctctgtctccatcttcctatgacattcttatctctgtatgtctgggtccagatttcccttttataaggacaccaatcattgaatgagagacttccctaatccagtatgaacccatcttaattgattacatctatcaggactttctttccaaataaggtcacatttacaggtactagaggttaggactttcgaagataaaattcagcccataagaatgtcttactgtaaatcccatgaagaagagcatttgctcattaaaaggacttagtgagatctcaaccacacactcaagatactagcaatcgctggcttcgaagcagaatggagtagtggaaatagtacaggatgtggaggcagatgtgtttaaatcccagccttagtacttgtttgagataccttaggcagatcacttcccttttctggtcctcagtttccttatttataaaatgagtacagtatctaccttacagagctattgggaggttcacgtaagacgatttatacaaagcatctggtacagtgcctggtacagactaagtgctcatttaatgctatttcctacttcccttttaaattgagctgatttcatgtaaataaagttgcaaatttcatagtattcttaatagaatttagaagtaaaaactctctggctaatattaaggttattagccagtctgaacatcatctaagttttgtatttgaagagtgatccttttagagtgtgattgataattttggatatacaataggaaatgcctttcatcatgaagggggtggtgaaatgtccatcactggatactttatagataatcaaataccctggctcatttataaataattgccttagggatgtgactggaattgattaaccctgatgaattcttgccactctgggctcatctatcttatcttcaggaatttgtagggtattaaggtatttaagggcagagtttgtttcttttcattaactgtcacatcagttaggaattgtgtttgattgcagggtggagagctgacttcagtggctcaaaagcacaagggtgtgttttatttgctcttagaaaaaatactggcaggtagtaagaccaaggaatgtatggctatgttttggtcactggggacccaggaaacttgtggttttctgttccatttttactgcatatttttgttcttaagacagctttatagtccaagatggcttttggagctcaagccaatgtcccaggtagaaagatggagaaaagaagaaagaggcaaagggccatccctcctagctgagtcaatcctcttgaggatctttacccaaaacctaccttctgtttttgctttatttgttttttaatcttaccaaccttacttacctttaaggaaagctgagggaatgtaaatatttttagctaggcactttgctactcaataatgtagataggagagaagggatatgttggcagctagcaatctctgagtcagttctctcaatgcatttgataacccccttcatgatgaaaagcatttcctactgtctaatcaaactattattcagaccccaaaacagtcactcttaaagaacaaaaagagtagttctttgtagagcacctaggatagttctttaattcctcagcgtttagtgaagtcattcagttatacaacaaatggtgacttttttttttttgtttggagacagggtctcactctgttgctctggctggagtgcagtggtgtgatcatggctcattgcagcctcaacctcactgggctcaggtgatactccctcctcagcctcctgagaagctggatctacaggtgtaaatagtgacttttgtgtgcctactaaatatctggcaatgtgcaaagctctacggttagagcaatgagggagacagacatagtccctgctctcatatagttatagtccaatggaggcgtagaggtgcataagtcaaagaagtgcttgaagacataaagaattcctattgtgataacaaggaatgatgtgagaggtgcgaaaaatggaactgtcttaattgtagagctaaggaaggctgttgactccatggatgagttgggatttgatggataggtaggaaataagtagttgaaggggatgtgtgggtaaatagcattctagtaattccaggcattccaggaagaaggaatagtacaaagggaaggtcaatgtgggaggagcatgaaaaaaggcttgttgctgtgacaggatcacagggagcaagaggaagcatattatgaaatgaggcagggaccagacatgtggggatatgttaggcatattaaggacttcagtcttctttccaatagcagtgggaagccactgagttttaaggtgggggtgttaccagaaaggggtcctgatccagaccccaagagagggttcttagatctcacacaagaaagagttcagggctaatccacggagtaaagtgaaaacaagtttattaggaaagtaaaggaataaagaatggctactccataggcagagcagcctcgagggctgctggctgcccactttttatggttatttcttgattatatgctaaataaggggtggatcattcatgcctccctttgtagaccatacagagtaagttcctgatgttgccatggcatttgcaaactgtcatggccctggtcggaatgtagcagtgaggacgaccaggtcactgtcatcaccatcttggttttggccggcttttttactgcaatccattttatcagcaatgtctttatgacctatatcttgtgttgacctcctatctcatcctgtgacttaaaatgctttaacagtctgggattgcagcccagtacgtctcagcctcattttacccagaccctattcaagatgaatttgctctggtaccaacacctctgacattttccccctcccttttataaaagaacccttaatcctaagagttgtaaatggacaaagagtcatcttctgtaacttcttcaggctaaataggggcaatgatattcctgcctaactattagggtctcttgtgtttggggtagagagaagctcagtcagaaagcattagtatggtgagggccattcataactccaagtttcaacaaaaggtgatatctggaagattaataattgttcgatttaagaaaacattcagtaagcttatcctgcattcctacacagagtacaacagcactatattgtacaacagcactatattctacaacagtaaggcaaaataagtaaaattatcccaagtaaattaaataagaaggctttccatgaactggccaactgttgaaaccatgctgatatggggttgctagatgattacaatgtgcctagaattagaatattgattcagatttttacattacccatccctcttgtttattctgagcagcagtcagagatcattggttggttcacagcaataagcaaggttagcctaagttgcagaaacaaactcaaaaacaactaagactaaaatctagtaacaggtgtaccatagttcttgaaacataatttttctttttttctctctccagtttcccatttttactagcaacaaatcctggtaagactgatttgctttattatacttggcatgattacttgtataaagtgcagcaagaataattatttttcacataagctctttaaattggcttcagtggaactctgttccatagacagaatctcagataagactttttttattttaaagccaagcccagctgtgggtttgtaccttcaaatacctatgagttgggtaaactcctcttctcttgaggtaccaagataaattggggctcctgggcctgttagaaagtgacattctttacttaccacaggtcaggaaccctgtacacggtttgtagacaaggaatgagaccagttttcccaaggggcttctaatggctctatgttggctcaagtcaagtttgattccttaaaggaaagcacgccattccagacaacgccttggtaaaataaccagtttctccaattgtgtcctcttacaaaagaaaaaagattcttattgtacttatgcaaataactgtattgccataattaagaatactcacaactagtttccaaattctggagaaattgggtagagagaaacaaatatgatccaaattttgttcacagaagtatactttactcagttgttaaaagctataaatagctcaaaagaaaagttttcttggctctggaaaacaaaaagattcagcaacgttttaagcaaaaaagtaaaaaaaagattacttcagttttttattagttcagtccctgccgttaactcctgttctgcttgaacagaactcctgttctatcatgaacgtttgagctctccatgagagtcttgaaagtttttcctctattctaatctcacagtctccgaagttatcagaaacttgcatttaagaatgtctgtcaaagtcctgtagctgattataaaccaccttttgaagaggatcaacacaagacaataatcatctgtggatggcaaaaagttttaggacagccactattaaagccacaattaataaggaaatttggttacttctgtggtatataacaatttcacataacaattataactttgataacatacactaagtcatatcagaattataggagtttctcataattttggaacacataccaataacacatttatgcaaatacaacccaaagaaagccaaacactatttcatatttcacaatgctttccatatgctttttgtaccaaataagccaattttcacctttatattagtgtactgttaatgtcaaccccaatttttaataaaaccttatagacaaatctatccaattttaatcagtttgaccataagataagattcttataaaccttttataaccctttacaagtttttgttaaagagcagattagattagtgcttcaaggaaaacctgttgtgcttttagtccaatgtttaatttacagaaaaactgaatacccttttaactgtagctacacacagaatttagttcacacacagaatttcctttatgagataaatttttcacaaaccttctacaacttgtttaaaccttcagctttatcctatctaacttaaaacaaccctttaatcctttagtttaggccaaaaatccacattcccattactttttataatttttttttttaccaaaaacacctttcactttctttacacaccttccatgtaaaactgtttttattttccaaagattactaaagtcatgtgaactaaaaggcattacgctttttacttttaaaatatttaagctcttattattcttaagccaattaaagctctttcatatgtaaacaccacacacacaacatatagaaatatacagacagaagaagatctagtagttgtaatatttttcatttgccagtttcttttctttttttctttcttttttttttttcctttgagactaagtcttgctctgttgcccaggctggagtgcagtggcgtgatctcagctcactgcaagctccgcctcccgggttcatgccattcttctgcctcagactcccaagtagctaggattacaggtgcctgccgccatgcctggctaattttttgtgtttttagtagagatggggtttcaccatgttaaccaggatggtctccatctcctgaccttgtgatccacccaccttggcctcccaaagtgctgggattacaagcgtgagccactgcacccggcctatttgcctgtttcttaattgaattactggcttcagggtggaccccagggccaggaaagcatgtagtttttatggcctaataagcaaacacagttggaaggcaaaatagctcccccaaaattaagggtcccagttttatatcagattctggatcctaaaaagagggaatcagcccatccccaaaaggacatttcctacctagttattacacaccagaactgtctcataatttgaagtaatttctgatgctccccaaagtcaaaaatgtcagataatgcaatgcaaaacagaacaaagccttagattttgagagagatctatctatttttaattcctggagatctatctacttttaattcctggggttccatgaggaaaacagaggttttttgtttttgtttttgttttagtcaaaaacatcagataatgcaatggaaaacagaacaaagccttagattttgaaagagatctatctacttttaattcctggagatctatctacttttaatttctagggttccatgaggaaaacagaggttgttcttttttttttttttccccgaaaacaggatctatggcacctcctgtgtttttcccaaggaactccaggctgttagaacttgaatacccacttttaattaagctgacttttaaccatagcagtctttaaaaacgtccttttgaattttttattattcatctttagcctggccaaatggcaaatatttctggcttttaaactttactaaaagtaacctcacaggtactctaagaaaggaaattcaagacagtttgtggaggggaagagaataaaaaatggtaaaggtcatgcagatattaaatcaggaataactcactccctaagccaggaattgaaccctgaaactgggccaccattgtgaaaagagaaagcatggccacatggttacaaggtcaagctcccaaggacatgactgaccagtttcctgggccatcttgaaagcagggcttatggggttctaagcccatgttctatcctaaggtaaccctctctatgacagaaagatacagaaagacaaattcatatcacaaagcgcaaaagatttgctgcagcttaagattagcctcacaaatccttttttttcccattaatcaaaactttacagaggagataaacagtattttttaccattcatttaaccagtttgcagagagagagagagagagagaggaaagcattgcttaaggcagggtggggaaggtgaagagctcagggaggccagagaaagacccagccatttctcaaaagttcaggcagctgcttgtcagttgtgaagggatcttttccagcagtctcatcagctctcaagtttcctcttttgggaaggaaaaaactcatgtcccatggtcttgtacatccctaattttgtcacccatagccgtcagcaaagactgcaaggcagattaatccaaagagaatagcagttaacatcccatagtgccaaacccggtcttggtcgaaagcaactttactgaccctctaaatcttaagaaggattctaaccttcttaagttgggcctcaaacccaagtttggtcaagcgtccttgccttttattaagaggggcctttaacccattctgtcttaggagagactctaactcccctaagttgggtctctaacccaatcccatcctttacctgggtgccctaccacttacccaaagccggccaatcagtgctgcagtctatttcctttgggttggggggtgtggggttcttcagtatcatctctttcatggtttgccagaaagatgttaccagaccccaccacttacccaaaattagcctttgggttggggggtttcttcactacagtcccttccatggtttgccagaaggatgttactggaaagggtcccaatccagatcctgagagagggttcttggatctcacacaagaaagaattcagggtgagttcatagagtaaaatgaaagcaagtttattaggaaagtaaagaaatgaagaatggctactccataggcagagcagcgctgagggctgctggttgcccatttttatggttatttcttgattatatgctaaggaaggggtgggttattcatatctccccctttgtagaccatatagggtaagttcctgatgttgccatggcatctgtaaactgtcatggcactggttggaatgtagcagtgaggacgaccaagtcactctcattgccatcttggtttggtgggttttggctggcttttctttactgcaacctgttttatcagcaatatatttatgacctgtatcttgtgctgatctcctatctcatcctgtgactttgaatgctttaacagtctgggaatgcagcctagtaggtctcagcctccttttaccaagcccctattcaagaaggatttgctctggttcaaacacctctgacagggttgaggtgtgggagcatgagaaatgattgtatttgctctttgaaaaaattacacttatagaggatggattggactggactgaatagtggcagactagacaggagtccaggcaagagatgatagtgacttgattcaagaggagggtaattatgggtatggagagaagtggctggatttaggtggacagattcttggagccacttgactttgggagataatgatggtatagatgtgtctttctgagatataaaacttcatctttaatatggaaaaagagtggttacattagattcattgggaataagaggcctctgttctacaggtttgtttaatctcaaaataaccccaacatcaccagacctggattgtgatatttttgtcctggtttagtcttagtgcaatatttgtaattccatatatttttccaatcatacactgtggtattttgataaaatgtgcacaaaagagctgtacagtcttgtgcactcagatgagcaatgctcaagtgatgttttccttgactgtatgagaattgttagcttttttaatttctcaaatttagaatttgagaaataattgagaaattttaggtgcccaaatttaaacatgttttaaacatggtacccaaatgcaatgtttactgctgactctttcccatccttaacactgcaaaaatgtcaggaaaaaagattaagcagcataaattcataaggacaaagaaaataggaaatcagatgaccatatatgagagtcaacaaaattttgaaatatggaaggcagttggatgaatggtaattgacttgagttttagctttttctgcttggttaaaagcctaaagccaattataagcaagctaatttttgccacaaaattccagacaggctcaaatattggtgccactagatacttttttttttttttttaaagacagagtcttgctgtcacccaggctggagtgcacagtggcgcaatctcagctcattgcaacctcctgggttcaagcaattctccctgcctcagcctcctgaatagctgggattacaggcacctgccaccatgcccagctaatttttttttatttttagtagagactgggtttcaccatggtggccaggctggtcttgaactcctgacctcaggtgatctgcctgcctcggcctcccaaattgctgggattacaggcatgagccaccatgcctagccagcactagatacttctaaaggtagggttgataggaagatttgtttaaaaaagatcccctctcttccatcatcatgctagggaagtactgtttatgctgcatagataggagtttactgtctagagagggtgactgggaactcccagatgtgggacaaataagacgtttggcaatgtttggggacattttttgttgtttcacaattgggtggcagtttcctagtggcatctagtgggtagatggcagagttctgctaaatattttacaatgcacaggacatccccacaacaaacaattacctggccccaaatattaatagtgttgaggttgagacaccccaagttaagtgaagatctagggtgagactttctgccttccatccaaccaggcgtgtgcatgtacagaccctgcaggaatgggggaatagctctgtggggaaattgactagcaaatcaaaagatacggacacctgcagatttcttaacaagacaagttcctgccaatcacccattgtgaattttactcattttcccagaacttctattcttcccaccccaccaacccaaccgggaaagtcaggagaccatcaggtgatggtcagggagttgttaaactgtctcactaaaatagtaattggttgcaggcagcaccagggaaaggcagtcttccaatagatagaaaacacctgaaagtggtgatcagctgcttcctgataagatctccggagttgggcgggttcaagcttgtggactaagaggccaaatggtggagtttatctggtatatgaccttcttctgggaacactctgctggtaagggaaaaacgcctcaagtgagcttgtgtataatttcacattgcgtgtggcgcccctcccaagtgctggcaggccactgagcaggcagacaacaccccatcaagggaagaatcaggggagaaggggcataaaccctggaagcatgccagcatataaaactccaggtcaaagttcaagccatgcatttgactctctcaagtcgcccccttggtcctcttccaagtgtacttgacttcctttcgtttctgctctaaacttcttaataagctttcattcctgctctaaaacttgccccagtctctcactttgccttatgcccctcagtcaaattacttcttctgaagaggcaagaagtgaagttgctgcagactcatacagattcgcggccattaacctactttggtgctgtgtgattcgaatacattccctagtggtaacaacatctgtaataaaagaaattttagggttttgttttcaggatacataagtgaaagtaatgtagaaaattaagcaaatgaaaaatgaggccagggcaaaagaaaaggcatgaacaagaaaggaaatctattctgactgtgcatttagagagtgttcagtctgcacctgcactgtgtaaatgttggcacataattattcatttaatcctcacagcaggcccatgaggtaggtgtggatacttttgtcattttacatttgttgaaaatgatgcacaaggttacatacccagtgcctggtggaggcagaatttggtcaaagctgtctggaatcatagtcgtaacaatgtaaatactgtattgctttaatcaaaatagcgatgtgactatatagaggtgatgatgggatcagaaaatgggagaaagttatgcaacagctaggtgataactctttgacagcaggaagtagatattgtctaaatggaaaaaggaaacaaacaatagcaatgaaagagttaatgtaaaaatgtggggattatgatcatagagaatagctaaaaagagttgagagtgcctacttggagggaatgagactgggaggggatagggatggagcaaaattggctgctctttttgtttccaggctgagtgctttttgactttgataatacatacatgttagtctaattttttaaaaagttaaagataaaaagaataaaggaaccctttagccttgtgttggatcacccagttgtaatctaagcttctacacaggaaagattcattatccccattcacagaggcatttcacctttcttttatatttataattgcagccatcaagctttaattggttatgggaaggcttatagggtgttctagaatggtctgcttattgccaaagataagccaaaatcatgccgagctggtttgaaatactggtctgctatttataaattatttcaattcaagaaaaaggtcttcttggcttgagtttgtagatttaattagacaatttcagagtcaaagttatggagccagttaccattttagggttgagtcaggttttatgaactcatccatggggaagacactgaggttatattttgcttttatgagtgttgcctcctgtagttattttctcattccttatctactgaaggaaaaatcactgttaataaatacaaggagtgaaacaaattgacttttcttttgcccttttggaactaggtagaggagacgtttgcatctcagtagtaattcttctttttgttctgagctctctgttgcattattcacccgtggactggcaaattatttgagtcagaaccctggtaggaatggccttagccagggactgagaggcagacctaatgctaacctgaatttgcagccccattacagttgcgccctgcggtgggggagagctcagcctcttacggccaggaaatcttctgaagtgaataggcttctatttaaccaccatgtggtcttgaaaattcgctcctgtttctttttttcaattttaaaaatctggtgatttctttcctgatgctctaacataaagaaaaataatgattctagccatgactgaggaaatagtaattgcaaatgttaaacaatgcctaggggtaagttttctatgtggggcatttgtggatgctgcatatttgaccatctggaatgggagttggaggtggccggttgtggatgctccacatgtattttagttagagaaggatcctgggaaattttgcaataagaagctcctttcatttgtatcaatttctggcagggacagagagctcaggtgtcaatcatacctttaaagagagcttttggctggcacctgtagtcccagctactcaggaggctgaggcaggagaatggcgtgaatccgggaggtggagctttgcagtgagcccagactgcgccactgcactccagcctgggcgacagagcgagactccctctcaaaaaaaaaaaaaaaaaaaaaaaagagagagcttctcaaataactgcccattgaaagggctattatttgagaataataagcaccaaaagaaagtctctcaggacaaatactgacacctttttattgctttttgcactcttagaggtagaaaacaagccactaacttggttgtggcagcattaatgagtatccttgtggaaggggcgagggggatgttgggctatgaaaccaaatttagtcaggcagtgtaaatacaacactcaactctgctcttttcattgtgagtttgttacgaggcaaagcagtaggttggggccactctaatgcaccaccagacactaatagctcatatttacaccggtaaaccaaatggttgcctttagggctaatccagcagccagaggggtcccttaggcttgtgttggtaaaagcaccagtcgtgcccaacccagggtttctccagtgccttgtaaagggactgccagcagagctctttaatttttatgtttatcaaacgatgttctgtgtttctttttatgacgaaagaggaatcatctttaaatgtcagcacgatgtctggcttaagtccgcaggctgatggactgaactaatgggagaattgcagagttcggaagaggtaaagtgcgcatgcgcaaagccagttttttttggggtttttttttttttttttttttttttttttttaccattatttgaattctccttgacttaaatcagaaataggcgtaaatgagctaaactgttttgaagcccagggcccgtttgtgccacagcatacttttatttccatcagtgtgttaccaacgacattaaggatcaattttctatatgaaaagggctttgttgagacagtgaaaacaaaatgactcattaaagaggtttaacctcaaaaataatgtgtaaatatatttgaattctaagcagacccagttgtaggctggttatattgtggtcatgtgattttttgacattatgataaacagtacgttttctaacattattaaaagcttgaatattttgttcttttcgtttttgtttttcacaataagagaagagccaccaacagaaagggtcataaaagaacccttttattgcttctgttcttaagggagtagttctcgaacttggggaacttatacaaagccacctcccagagatttagattcagaaggtaaaaagaggggtccatgaatcggaacatttacaaagtgctgcaggtgattatgatgcagatgggctggacaccacactttgggggaaaaaaccccaaccaaccaaacaaaaagtttccttcaaaccttatttggcatcaaaacttctcccatgtctcaaaccctcaggcctttgcacactctaagaggctttgcctcactattaaatgagtgggctggagacccagaccagctggagcctcagagcccactggtcttgtataattcaagaaccattgattaggtatgacacacgccagcccttctgtctccttgcaatcacagtttttatgggagccccaagccctcatgcccaccatgcagagttttcatagaacatttagcgttcccagaggttccccagagcccacacttttgtttgagagccttccttctgagtaaaatgaatctcctaaggctttctctttgatgagtgggaacacctgttaaattccttctccctaaccagctcctgacaagaatatgttaatcccatagggttgaggtcccctgaagttctatgaccagctctgacaggaacagaacaatagtttgcccaggagccagcacttaaaatctgcagtaaaatacttggcctgcctcccgctccctttgtgctatctgaaaaaatgtggtgtgccgtggtatattgtttttgggtaattctgcaggccagtcttgaaatgaatgcttgtaggaagctgtcaagatgaacctagcattaagctataaaggttggttggaggtggtttaaataaaggcatttgcttggggttgtacggaataatggaactcttaagtgagaagtcgaaatagcaaacaccgctggctgccaacagcacactgtgccattaacctttcatatgaagtcattggaagataactgaattatatttccttgggcggatttttttttaagaaggtaagtggcagcagggatctatttttattaaaaaggcttgagaagtgcagtgaaatggctgtgtgtttgcaatcacgtcttccctgttatttgacaaggcctgaataattggaggcagaagaatcagtagttctgcctcgttgctgtggcactttgctggatgtgctttataatatttgggcaaatttgccattatccttgtgtcttaatttctcacttcctgaaatatgactttacgctttgtagcatgatgggacttccttaaatgttggcagattgctttatgtgttcagatgtgcaaagagaaaataattgaatttattaattatgcattgcagttcatattcatttaaagctgtcaagtgattagctgtgggaggtgcgtgagaaaaggactgttaaaatgacagcagttgttgctatacatagggctccttgttgctatgcccataacctcttaaagaaatgcacattgacactttaaagccgtagttaataaaaactgggttatgggcaacagagtcgtttatatttcctcctttatagacagcaaaggctgccatgtgccttccaaaagagtggattccatgtatagagatcatgttccatgacaggaggtgctcatccttcctatttgcaaattctgactttgccaggtgctagcagatgtcatgagaaagacacacacaactgtgggtctcagtttctctccctagaaaacggggaaaatacggtggttgtgcagagtgtcctttttggtccagctcacatagccaggatgcgtttgctagtttggggttagaaaagaaacaaataacaaggccggctggtagctctgcagtgtctggtctaagttggtactcagtgctgtttgtgtgcacaaagctaaagctcactgaagctagctgagataaagggggtttcatggaaaggacacagcgaactcccaaacacagatattgcaatgcagccagccttcatgggtactgcagcaggaaatgactagaaatgaagcggtggtctccagtggcaggagttttctggcttctctgtatcttctcagccagcttcttccactaggttcaagcatgtttctgatctctgcagtctacaactcaccactgactgcctgtagatgctaagactcatattccttcatttaccaagtattaataagcgcctacagtgctccaggcactgttttaagccctggtctcctgtggaagattcaggcaataatcagataaaaagcaaaccaatcaataaacagtgcactttcagatactgatgagtgaatgcaaaataaaataaggtaataaggtaattggatgggggaatgtcatgctgctttaaagaaagtggtcgaaggagcatttgaatagacttgaatcatgggcagagcctgcaatgcgaagatctggggaagacaattccaggcaaagaggccagcatgagtcaaggttgtgtgtgaggagtgaaggtggtgctttgaaagattagcaagaagtcacagtggctggagcataatgaattaggggtgagtagtgggatttgaggtctgagaggcaagaggtagggacatctcacaaagggacttgtaatatggttagacatttggactttttttctaagcgaaataaaaagccattgattggaagggtcttaagttgaggagttacatttgatcatgattcacatttttaaaagatcactgtggtggctgtgtgaaaaatagaatgtagaggggcaagagtaggaacaaagagaccaggtagctgactattacagtaatccccttgagaggtgatggcagctgggattagggtggtggcagtggagctggcgagaaggggctgtgtagggatattgcaggatttgtaggtgagttgggcatggtgtgataaaaagaagagataaattgaggttgatgactaagttttgccagagcaactggttgcatggggtggccatttgtagacatgagggaagacagggaaagggtcaggatgggggtgagggaggagagaaaataaattcatgttttggacacgttaagttttgaggtgcctacctggtctccaaatgaatctgtcaagcagctacttggatatttgaatctggagcaggggagaggtcaggactggagattagctaaattttgccagaggtgtagctagaatcacccagagagagaatgtgtatagagcagaggaggcctggagctaatctctggggtaccccgatatctagaggtggagatgaggaggagagccaccaaagagaaccgaggagcagcagccagtcaggtaagaggtcaaattccagagacagtgaattcaactgatatctggcccaccaaggtgtagggccccttccagtctgctgtctgtccttggcccaatcagtagtcgctaaagggaatgggggtatgaggcctgctgtctactaagtttgtgggcagtccagatttcatgagaaggggaagggataggacgggcaggcattctaacacttgcctaaagtataatttaaattttgctgacagactgttaagggatattatttctctctctctatcatatctttcttttaatttatctcatttttacagactttttattagttccctcttaacttttactttcgaaacaatttcagaggcatttggtaccaccagtatcaggatttcttcctacttttctgtcttctttcctttcttggtccagcttttaaaggtttctttccatgctcccatccatggacacaatgcggcctccgtattttgaaccctgtggaggaaccataggatggggtgatcatcacagtcagttcttctccaggcagtggggaaatgatcctttcaatctggtatgagttttgttggaatgaacctttcacccaagtagtgctaaggcatcccaggaggctcatactagcaattccaccccaccccctccaccagcctctgcaaaggagagacagggaaagaatagagaacattacttaatttggggagttatgtgactagctgttgatgaagagagactacatgatttcaggaagggcctgtaagggaaggggcgtgaatggggaagatgatatagcattgcttcattctggcctcaagcagaattctcaatcctaggccacaggtcactgtgcaggtgtgagtcacgggtgggccacagggccagcagggtcacaagtgtaggcaattgtataagtctaccatcaccattagaaaaacaacttcaagtgtgtgtcatttcagaaggaaggcgtgctatttgctttaggtaattatacttacctgtaattatttatgtaattatagctacctgtaattatttaggtaattatagttacctgttcaccagcatttgggtacatggttaaagatgcagccagagaggatttattcaatccagaagcctcttaggtgaatacaagtattattttgtgttggttccctagatcctctttgctgtgagaggatgcattctctctggagagtcattttgagcttctatttctcacatataaactgtggaaaatagagttgactttttcactcccatgattgagtttaatggccttgagatgtggcaaatcttatgtagctgctaaaatcttattccatttctatgttcccaacctcttggctttatttttagggaggctttctgttataaccggtacaggcaggtggttcagcatctgcccagggagaatgagactgatttttcttctccgcaagcctgtgtgtgtcactcattagcttgacttggttactaacaataagtcacctgtgttctcttagcagactattttacaaacattttaaaaacatttcaaaagttgagaaaagaaagagggaaaatcttcataacacattttcttaataaacacgtttcatgttttataataaacatgttatttttttattcctttttggtctttatactatttatatgtatttttagaattttaatgatagcatacacaagttttatattcctttataatatttcataatagttttattttttacatactatttcatagattagaatgaccataatttatttgatattctctttggggacatttattttgtttccagttttttgtttgtttttttttttgagacagaatctcgctctgtcacccaggctggagtgccacggtggaatctcggcttactgcaacctctgcctccctggttcaagcaattctctgcctcagcctcctgggtagctgggattacaggtgctcacccccgtgcttggctaatttttttgtatattttagagacaaagtttcaccatcttggccaggctggtcttgaactcctgaccttgtaatccatctgccttggcctcccaaaatgctgggattacaggcatgagctaccgcacctagccaacgtggaaacattttcatgagtcttgattcatcttgccaatgtctcttaagtttattattaagattctcctattgatttaaataagaaggaacctcagaagggagaactataaaggagaaaaagaaaaccctaagagatgcaataaataattatccagattattctaatttatcagacctacataattctatagtattatacaagcacacattgtataatattatagtattagacaatcctctgccttggtaccactattgtcccatcaagtcctgagaaaatgagagaagatttcaatgagagctgaacctcctgttacattactatgatcctatagtattatgtaaatgtaatcctatagttttatagttatgtttccataaatattcatggacacatagggaaaaatttccttttggtaacatctatgaggtttagacttttcttggtgtggcacttgctgtgagttgtctacttgttatatgttctctttctttcttactaagagaaatctgagttttttcagagcaataggccccgttaaatattcagtttctcagtgtgtcttacagctaactggccaggggacacagttctgaccaatataaagtaagcagaagtctgtgatgttgtcttttccccttcctccttccttttgcctgggatgcagctgtgatgcatggaggtgtagcagccacgttatcaccttatggaaaagaagccatacatgagaagaaatgatggagcagtacaacaaagttcccagctgaatggaatcataatggccccacccaaaattgattaaaaagtcacagctgaatggaatcataattgatataccctaaattgattaaaaaaccactgttctagtttattgcatatattttacaagcatcttcaagttctttatagaagaaagtagatgtaaacctgtatacacatcagtaataatattgtgtggaagtaaatatgcccacaggaagaggtggaggatttcctgtggaaccgacgtgagagctgctgatcaagtgcagtcagggttgatggccataaatctaatttctgagactcaaaaaccagtcaaaaagtatacaggtcatcagtctgggtttggggcacaaaaattaagatcttgaagagaatatggccaacaggaagctaggtcagtctcctaggggttcagaatcagctgtcacaccaatgtcaggaacttctgagataaagactgggagaactttatagaatagaatgcgagtttgcccagagggtggattgctattagagaagcaacccacagataccagactgtacttctggtgccattttccccttcttagtccacttgatagcttaaccaaccctctgcctttgtaccacttgtcccatcaaatcctgaaaaaatgagagcagatgttgatgaaagctggaccttctgtaccacatctgatgattgggtgattttttcccatagactagcttctggctctgtacatttcaaaccttgtttctcctttgccacttcagtgctagacacctgaggacttgttcatgtcttctcgccttgtaccgtcagtaaatgtcactgggtgaatcagcacagtgggtggtaggaacgttcctgaaagtcctatataccatgggacagacagcaatcacttaactacacatagaaatgatcacaaaactcattaatggtgtcctgcaaaacctctaactcgaggtgttccaattcaactgccagattccaaaaacatctagtgcaactctggctaccttatgtgagaacaaaggagaacctgtggtgaaaagagacagcaatttcaaccagtcgctgttgaaataccttattaatgcaaacattttaaaaaatcaccatgaaggtacagcattaggaccctgcctagggctttcaaaggggcttgtgtgccctcagaaagggtcctgaagcttaagctcctgaagctttatggcaaacccatctttgtacactccttttaggagatgtgccagcagcccatgtgataccctgtggactgctttgtatgctgcttgacaatttgagacaagtagctttaaaaataatatatattttgttttgttttaaattttaggtaatccatgctatagtaaaaaaaaaaagcataaaatatttttactgtaattctgccatttcatataatttctttccgatcatgttacatctatatataggtatataggtatatctctctatctctatattctcatcatcaaaaacaggacaacttccaaatgtcattttaaagacgagatttattgtgagctttcttttatataattatatgtcatgaaatattcttataaaagggtgatattttattttatttttttgaatcggggtctcactgtgttgcccaggctgcaatgcagtgacgcgatcttggctcactgcaacctctgcctcccggcttcaagcaattctccttcctcagcctcctgagtagccgggattatgggcgtgtgccaccatgcccagctataaaagggtgatttaaaaaataactttgcaatattctaaatttccctattattggacatttaggttattttaatatcttttatattataaataaagttgtggaaaatatctttctacatacatatttatgtgcactttttattatgtacatgatacattcctaggataaattcctagaagtgatattactgagtcacaagatatagaaaatgttaagaattttacacatacagataagttgttctccagaaagtctgtatgaatttacacttatgaaaaaaatgtgtgagagtgtttttctaacccttgccagaaaaatatacaattatttagaaaaatctttcgaatggtgtcccatggttaatgcttgtttctctgatgattgtgatactgaaaactttttgtatgtattttggctttgtatagcttatgtaaattgtcagctccttgggcaagagtgtttaattagatgatttttaattaaggcactacatttcccaaagtgcataaagcctattaaatgtattattattattattattattttgctttcttccatctgtctgctctctctctggcttttcttcttttctctaagtagcggagggcccaaagagctgcccttcacaaactctgttgttgtctttgtgttaaacttagccagatgatactgtcatttttggaaggttgaaaaatggttgactatcagaaatttcatgtggttaaacctgatatatttctcttgacaaatctgatttaatttccctttctccctacagccgaatctttcccctcttttaagggtcgttttaaatgtgattctcttgctgagtgctgcccctcccatccaccccagctggaaattcctcaccatcatttgatgtatgcatctttttcattctatgatatgtgtagtggtatttcattgtgattttaatgaggcatgttgttttaattccatgatgaataacaatattgagcgccttttcatatgtttaatttctatttggatatctgctcttataaagtgcctattcaagttttttgcccattgtcttaacaactatagttttatagtaggtcttgaagtctggccgtttaagtcctccaactttatttttcttttttcagagttgtcttggctatttcagatcctttaaatttccacataattttcagaataagcttgtcaatttctacaaaacaatacctgctggggttttgactgggactgtgttgaatccataggtcagtttgtgagaattgctatcttcatccatgttcattgtatatcttgccatttatgtaggtcttctttcattatctcagcaatgttttcaatgtaggggtcttgcatatcttctgttaaatgtattcctatgtatttgattttttatgccattgtaaatggtatttattgttttaaaatttcgttttctgattgctgattgctagtatatagaaatacaatttgttttggtatactaactctattttgtttctctccttacttcacatattcttgtagttgtttatagatagatttcttcagatttgctagatatataattatgtaacctgctaataaaggtttacttcttcctttctaatatgtatgccttttatttcattttttaaaccttattgcataacttctatacatttttctccccttcggactgtaagctgcctgagacaagatgctttgaggcaaaaccctagcatagtgctttaaacatcgaaaaggctaagagaattttcgttggttatgtaaatgatgaaggggaaaacaatgacattaaagccttaatttgctattgtatatgatcagtgaaccaataccaagaaaaaggatactggttaaaaaccatttttatgagttgatacatttttatttgcaaggattgccacaggtgtgttcaagactctcccaggccattctgcttggtttgtggttcctggttcctggatcctacactgatgttatgttagtgttcattgcgttcttttataagactcttactaagcattctgagaattccaaaatagcagtaactgcttctccccaggatagcacagagcagatggatccctgaacctcattgcctttggtcccaattccccaagcttctgttggtgtagaaaaaaaatctgcattttcaatattgctggagtgaagcctgggaagttttcaactttgagtctttaaattccaaaaagcaatgttatttttagatttctattatacactaggagtttgtgagtgaagtcgtattaaggggtgaggatgagggcttatgtgaatgggtgatggtcttttcccggtaagcagccattcttgccagttttgaagacacatgggactgtgaactggctgcccatgagctaagataactcccaaggtaggaggaaaataagtgattggacattgatacctatttttgcatttggttgcagtagttatttcttttttatagatttcactgtccacatggctgaaagatgcatgatgagttattttctaaggaggtaattccattgtttctttgcaagctgcagatatgctgttagacatttaaacagtagatttgtaaagtatttaaggcagttttgacttcatggccacagggattgctgtctggtttttccagggagcagtccccatgaaagagctaattatgtttttgctgttgaatagatatggatcatcttgaaaaaaatgaaagtgacagaaaataatagaaaagagaaaaatcaaaaatgaatactcttgtaaatttggattaaataatataaatgcagagtgataacttttttcaaatatttgaatttttcaaatactttatatatgtcgttcttttaaatatttacatattgacattaaaacagtgttctagaagtaattttgtgactattattagtggaatgcttctatttgccccaatcacctgaactcctaccatctagaaatagtaaaattgtttgttataaaataattataattgttatgaaataattacaattactttttttttttttgagacagagtctggctctctcacccacgctggagtgcagtggtgccatattggctcactgcagcctccatctcctgggttcaagcaattctggtgcctcagcctcctgagtagctgggattacaggcaagtgccaccacatctggctaaattttgtaatttagtagagatggggtttcaccgtgttgcccaggctgatcttgaactcctggcctcaagcgacctgcctgcctcggcctcctaaagtgctgggattacaggcacgagccaccgcaccaggcctaattacaattactttccaaacttaaaaaaatattatatatcctgtttggaaatctgcttctgtcatttaacaatctatgttatgggtatgtgtccatgtcaagaaatacagaattacattattttaatttaatagctacttaggatttctgtgtgtgtgtgcacacacatgcccataaaataaccagttctttgttgacagatatttttgtttagggttttttcctactattataaacaatattgcaatggatatccttgtacataaatattgagcatttatctgattagttccttaggataactcctaggagtggaattctaggactcaaattgtacattttattttttgattcatattgcaaaacattcctgcagaaaatctaaattaattgatactctcatcagcatcaaatcaagagtattgtttacctgctccattgtcaacactatttgttgtgcatctttaaaaattttattttatttttaattgacaaataataattatttatatttatgggatataatgtgatgttatataatgggatacaatatgatatatgtttacattgtgcaaaattaaatataactaatgaacatatccatcacctcacatatttatcatttttttttttgtggtgagaacatttaaagtctcttttagcaatttttaaatatatgatacattatcattaactattagccatactgtgcaatcgatccctaaaacttattccttctctctaactgaaactttgcaccctttggacaacatctccccattctcccatcctccactcccctcacccagcctctggtaaccaccattctactctctacttctatgaatttaacttttttagattccacatgtaagtgagatgatgcagtgtatgtctttctgtgcctggcttatttcacttagcataatgtcttccaggttcatttatggtgctgccaatgacagaattttcttcttttttaaggctgaacagtattccactgtgtatatagatcacatattaagtatcctgttgtgcaaatatttattgagcaaatactatgagctagacatttaaatataactgtgttcttcctcaagtgttacccaagagaggaaaaaaaagaagaaatattgcagtgctcaagacagaaatgctttttaaaaagctagattatttcagaagtaagagctagaatggaggaaatcaacagactggtggaatctagagggtgtgggcaggggtaggcaggcaactttaaactgggtagccaggggtggcctttctggggattagaaggtgatttctaggctgacacctgagacaatagcaactcaagccttgtgaagaacagaggaaagaacattctaggcagagaaaacagcaggtgcagaggccgtgaggtgggatagagcgtggcctacgcaagaaacaggagagaggccagagtggcgtgagcatggggagagaaatagcggatgctgtgaatgaggctggagatggaggtaaaggccaggacacccagagtaggccgtggagggagggggaattttttccaggtgcactgggcagccaaggagggttaagtgggggagcgcgagatctccctgatcactcctggtctggtgcctgtcagtcggtgtccagcctcttgattcctgatatgcttctactgtggtgtactcctgcatgtaaatacacgaagtattctctctctctcactctcctttaaatattttgggttttgggtggtggtaggttgcaaaactagttctcatgtgtctgtgggtgaaacactggaagacacagccaattgtgtagacccagactgttagaactggaggactggaaatggaaatgcaattcaacagaacagagcgaagggggagcctgtgagaaaagagttctggcattgtgaagccagttggaaaataattgtattagaccaggaaagagagaagggcaggaaaaacagggcttgggagaatacgacaggggaagtctgtttgctagatgtgattcagtttagttctttattctctacctgctcccacttttgtggggtgcctgcttcctgctgcaggatagtgaggtgtgttactgcaataatatctggaatggactctggggctacaaattccagagggtataaatgatactgctgaggctgccccacaggtgtatgtttaactttctgaatctggcttacattctcccattcttcaaaaattacgttttctgtggtagcaagaggcagttatgatgattcagaaagataatgcctactggtgctttactagattctcttcctggaaagtccttgctaaaattatgtcaaggtcatataaggacagttttgtgtgtgtgtgtgtgtgtgtgtgtttgggacaagactgattctgtatcactttaaaagtatacagttgaaggatgagtaaacaacaacagcaaggttaagtgtttgagtaacattgtttcagtgataactgatctgagtttgatatcttgacacaggctgccactttggattcagttgttgttttaaaatggcttcacatgtttccctgtcacctcaggtgcttcagaggccagcgtgctagaagtgagcacacatagaaataagacacagactcagggtttgcacatataacaggtggacccatttctctccatgggttaggaatgggcaatggtttgggggactctattggaggtggtttgatgggtcaaggagataattttatcatttccatttttagaatctgaaagatttctttcagtcttctggaatcttcctttaaaatgcaaacaattctgaaccaggccattttcacccaatatctctgttagaattagtagaaatgagcttggaggtaggtgtccagaggcaaatggagatgggtagagcttagaggaagctggaaggtgaccagaggtatggaaggatgacatcaaggacaacgtcaggccaactgcctccttcatgagtggggctgtgcacactctctttctgaaatgttgtgctttagttgaagagttttccccaatattttgatttaacataaattagtgcattttggtgcaaagcccatgctgctttcccagagtacaaaaaagaattaggtggaagcttcctattcagacgtgccccaagtcacgttaacctgtgggcacacacctgccttgctgcgggttttccctctcttctctaagggcaggtcttgaaaggaaatggatttcacaagttgtattcttttaaagctacatcacaatggtcactaaatagctatttgtgtcatgaatggctgcctcccaggctatgcctcaatcatcttgttcttcgtgtattgtctgggcccagcaccgtgccactcacacagtgagtgccgactgtgagcaatgcaataagattctagaattactgaacaaatgcttgaataactgctagatggtattagagatacaaaccttctcttaccttgggtaaaaagcgtatgctgatcctggtagcaaatgaataagatcctaggaaatgagaaccagaacataaaatatatttcaggaagactgagtgaggagggagtggctctcttggggacaaaaattatttctagttcaaagttattgtgacaattgtggagcacatgacctgtgacatttccctccaggctttgcctgcctgcctgccttttcatcagttcggtattgactggcctcaccttccggggaagtggggaatgaagaaatggctcattttactacttgttagcgctgtgagttgggtccaggagggtgaaactaatagctgaaaaaatcctaagggttttctaaagacttacttattgtcttctcatgaataattgagagccatatatagttataaaatcatatacagttataaaatcatatatagttataaaaattgtcaagaaacccacaacccactcttgtctccttggaaatgtggtatggaaatgtgcaagaattttatttatttattactttattttaatgtttattctggagacagggtctcgctatgttgcccaggctggtcttgaactcctggcctcaagcgatcctcccagcctcccaaagtgctgggattacaggtacacaccaccttgcccagagtaaaattttacttttgaggcagcatagctgtgatatttgtaatattaatgcctccaatagcaaattcctgtagccctggggagtttaaaattgggatgacgttggatggaggatgcaggtggtagagaacaaagaaagctgaattctaaaaatgtgcagcctcaatgccctgacctttgtgtctctcgctgcaatgtattaaaggcctctgtttcatttgtaagcattcattcatggaggaataacctcccaaaggtttgtagcaagcattcctggggatctattggtagcttggacagaaggctgagtgcctggagttgttcacatccccgctttgcccgctgtcactctgccctgaggtaacaggcaagcggcttccttgggtggtggcgcctgcgtatggagcagtggaaatatatgggcagatatgaaaaaaaaaagagccttcactgattcacatcaggaccaagtaatgtgacttttcagattagcagatcgaaatctgttgcagccgctcagcatttctatttcaagcctggagaacatctctccaactgtttctttcttctttctccactcctgcttcagccctcaaagcccctactgctttttagctttttggttcctcctgtgctgtagagtccattgcctgaggtttcttgatttttttttttttttttttttttgccaaagtgagaagaattgtcaaatctcgtactctattgtaggctggactccactgaagacatgtcagagaagcaggactggggttcccataaatcctggttgaatgagcaagggcatgagtggatggggagacacctagggaagagcaaagtgccaaagaataaagcacagcatctagggtgcttcccgctgataacactcaactttgcacactggctcaaacatggtgtgaagaaagttttcattcctgtgtggtatgtgatttttgtacatttcatatcattagaacaccaggttcatggagcagctgctacctgtagacactgcacttgaccctgagctttcagaggttaataagctttagctgccatccccaaggggctctctgtcgtggaatgctgtttgttttggacctgcatcacttgtagaagtagaaggggctcaacaagtgtctgagaaagggagtgaatgatgttcatacaaagaacgaaagaactgaaagtgattcagcaggttttatttgtatttggtgtacttgggcccagtggtgttgtggaggtgtggggagccatccattcattctccctcagcctgccttgccctggtggcacctgtttcagggacatggggctgggttaaaggagcatgtacctgactcgtacaagcatccagtggcccttcccctgagccctggcagtgttggggagtgggtgttagtactctctcctcttgatgtagatattcccagagctctggggctggaggatagatgaggaagggttaactccagggtggtgacagctgaatatacagcataaacagcatttggggatgagatcacttctgttttgggaacctgaaggcaaacacagttgcatttgttcgtgtaatcattgccttgtttgaggttgtttatgtttagaaattcatgttggaacatttatcagttggggcacagaaaccaactctggctacttaagccaaaaatgaatccactggtaggccatggagcagttcccaggattgagggaaaagcatgaattgtatatggacctggtctcaaaaggaagtggggcaattctggggttctaaatactgggaaattagggatagtcttttcgggactcacctcaggatgaagcaggagctgttttccatcctgaagttttcctggaagagcaagttggctgggtcattctgcccatccctttaggtcactaaaggaagtcaggtgtgaatgctgggaaggcagaaactggcagctgtccaccctatgaaatgatgcttgctttctcaggcctccctcttcctaatctttctggtctatttcctttgagacaggctttcaagagtagttttgagcttttagagcattccttggggctgtagtggacatgttggcaactgtgactggaagaaatcataacagcatggaggcaacagatggaaaaatttgaagtttcatttaaataatgatcttaaaaaaatgtccctttatctacttattccagatcatctggatgatgcttaataccacaagcacctattcctctattcattcatttttagtgcatttggattttctggagcattggtcggtcctgagttgaaattcattaattgtcatggtctaatgagaaaaaataggcttaattaaaaaaatgcatctgcgtcaagtataggccaaatgatatcacagagtgctgtttttagaagggagaaaaatgttcgggaaatggggtctttatgtagcacgtggcagctcaggcatgatgaatgcaagggaatctgggccattgcagtcggcaccgtattcaaattgaaagcagcaacttagtttcagcaaaacaatataatcctttacatgccactaatgttattttgagttttattggctttgcagttttgggtttaattagtgcattcattttatagtggtatgagactacaagcatataaatcattttgtatttctatatatttaagtgagttataataaaaataactggtcaaccctggaggtccttgaggatttttttttctttaaaaggaaagtaccttattcaagttttagaaatgctagcctatgggagatatttgcaccctctctgaccccacctctatgggaggggacacatgctgggcttggccatgtgacttgctttggccagtgggatattacctgacatgaaagcagaggctttataagagcttgtggattggcttggccccttgtactcctctctttctctaggagaagatcatgtttcaaatgctgttggttcaaagaggatgacagacatgtagagcctatctgaatccagctcagtcaacctggatcagctaaactctagccaaccgacagatctgtgagcaagaaataagtgtttattgttgtgtgagactgagattctgtggttgtgtgacacacagcattgttgtggcaataactggctgattgatgaggtagccgcaccctggagcatgtgagcacaggatttactgagcacttactatgtgctagtcattgtggtgggtgctgaggctacaatagtgaacaacaaagaccaagtctcagcccttagggggcttccattctggtgggtgttcaataatttttgcttgactatttatctgatgaaagctttatttttccttttttcaaaaaggcggactacctctactctgacttttgttgtttgtttttgagacagcagcttgctctgtcacacaggctggagcgcagtggtgcgatcatagctcactgtaaccttgaactcctggactcaagggatcttctcctctcagcctctcctggcctcaagtgatcctcccacctcagcctttcaaagtgttgggattacaggcgtgagccactgtgcccagccaacttcgacatttttgaaaagtgaaacatataggtagatgtgatcttatctacatatggattttatatttaaccaaaaagtcaaggaataacttggctagtgatgttgtcaccattatcatcaaaattgccttcgttaaggcatttgcttctcttgactcatgtctagaaatgtctagaaagaatataaaaatagatgaaaaaataagaacatcatcattttgtctaccaattttgctcttggttgattttgctttatacaaagttttgactgggttccataactaaaaataatctccgtgtgtacgtgaaatttcaccagggtagatgcgcttatatttatgcacggctgaaaattctgccgagtatggaggtctgtggcggctgggctggaatgaaaacacagtcctgggaagggaatttgaaagcagtgttgaatacatttaaaaatattattcaaatgactgcaaaagttcatttttatgaatttaggactattgggaatcagcagcaaaatttcacatttcttatttcatggagagcagggctgaaatgcagctgcatatattatattcagttctcggaggccttaaagcggcaaagcccatttcagatttaacttgaaggagttgtctaggccagtgctgggtaggcagtaacaaacagcaggcggtttgaaaaataatctgttgcactctggaatgcagtgaaatttggaatatttttgctttggtgaccaactcccttttgtttaggtcccaaatgtcagtggtccagggctgctggggtaaccctatggacacagtcatgaagtacttggatgtccatcagagccataaaagagattatccattcaccctggggggctcctacccgtaagtgggtgtctgcagttctcagagagaagctgatgctttctccctgctcattctgcagatggtcattctgtagagactcagcttgacccactgtaatcttctggatgggattccttgttctttctccagaacctctgctttatctcactgagttttcacttttagggaggggagaaaggaatagattgtttgggtgtgggatgtgttgtgggggcgggagtctgggacatctctaagtctgaaagagcacgatcaagctaaatggtggaaaatgaggaaaagcggcttttgtcgctttgtttccagatgtaaataatgctgccaagccatgcagagatggaagagaattttaggtatgttttggaagtgttaaccatattgtttgacctgtgtcctcattcttttagctgccttcccacttgcctagaaacaatgttttacttctggtgaagaagtgaatttttttttttggtctgattgagttaaagcctgaagtactcgggacacagatgaccgattgtaatgcgatcttgtcagatctgccctcaaatctgttgaattttccgtacttgcctggcagccctgtgcttcccaggcccacatgctgtggctgatctgttttaatcatcaagctctggggctcagtcaaaggagaggtgttgccattgtcaatggaaaaggaataagcatggggaaacctgaggctaaatgagggtctggttccatcagaaatagttctgtgtggtcagggaagggaggaaggaaattagtatttacctaatcctacctcgcccagccagtgcctggactcagaagtgaggtctcagactggctgtccagagaagccagaagtggtcacaaccagagatccagggtgatctatgccctagaacattgattctcaaagtatgttctctaaccagcatcttctgtatcactggaacttgtcagaaatacaacttcaggccgggcgcagtggctcatgcctgtaatcccagcattttgggaggccaaggcgggcagatcacaaggtcaggagatcaagaccatcctggctaacacagtgaaaccctgtctgtaccgaaaatacaaaaaaattagccaggcatggtggcacatgcctgtagttccagctactcgggaggctgaggcaggagaatcgcttgaacctgggaggcgaagcttgcagtgagctgagattgcaccactgcactccagcctgggcgacagagtgagactccatctcaaacaaaaacaaaaacaaaaaaacaaaaacaagcaaacaaaaaacttcacggccgtactccagacctgctgcatcagacactctgagggtaggccccctggcagctgtgttttaccaggccctctggtggatcctgatgcctgcaaagttggagaaccacagccctatctttagatagttaaaaggcaccaagaaccccaaaatctgtcacttaagactgggacagggagtggggtgttcagggctcaccaaagaaaagaagacttttcccctcctacctaatagttaacaaatttagcagataattcttatgagatcattaaatactcaatcttttcctttcctaaatgttactgtagcatagcagtgattcatgcagtattgtaaacctagaaaaatgagtgtttagatcctattttgatattttactaatggttttacatgtttatagcctgattttgttcatgtttgccttgacgtctttcagaattccagtctgtagctaggagtgttataaacatcctttcatccatttgttcgttcaaatatcagggactgcctgctatgtgctagaccctgaacttagatgagaacacatggtctttgctattaaagatatgtagtacagggagatgatggagttctgtttataacaataatcacaatatacccacttgaggtgaatatatgaagatttgggagcaaagaggatggatagcccatcagagaaccttacaagaggatgtccttggaaagtcttcatggagaagatgatatctgaggagcagaaaggaatgaaacatttaccatgtagtagaggtaggagagaatgttctaggtaaaggggaatacatacggaactatatttgctataataaactaccacaaacttgtagattaaacaatacaaatttataactgtagatcagaagtctgacatgggtctcactgggctaaaatcaagatgttggcagagtgcatttctttctggagactttaggggaaaatccctttttgtgcctttttcagccaagaaaggccgtctgcattcctttccttgtagccccctcctccatcttcaaagacagtgacggtggacagagtgcttctcacactgacttttgtttggttttctggactcatgtgattaggttggaccaccctgaaaaacctatgataatctacccatctcaaagtcatttatcttaattataactgcaaagtccttttttgccatgtggagaaatatactcacaatgttctgagaattaggccatggggcatcttcaggggccattattctgcagccaccatggatgcctgagagtgtagactgtcttagaaagaaaaagaaagcccagtgtaactgtgccaaggccaagagcgagggagagagtacagctgagaaatggaaacggtgtgtggcaaaatggaacagcgatgctctcagcagaggtctgagttttaaaaatatcagcagctgacttaattctgttgattgactattttagagaaggaatttctttctttgtgggggaaaaatgaatggtgcccacagggacaggtataggtaagtgggaacattccatttcttcttttcctagtttttattattttatttatctgtctaactcactgacccagaaatttattgggtaagccactgtgaatgacaggagtttgggtgcaatagatacgcttttcaataaacaactagtcattgaattgttatagtaaaaaactttatattctcattgcctgaggggtgcattcaggatggacacagtgtccctgtgcggtaaaataatggtaaatcttgctcaccttcctttctaaccatattgtttgacctgtgtcctcattcttttagctgctttcccagttaaagatgacatatcataaaaggagaccttgctggctgttttaagtctcctaacattgaagtctctcagctggaaaattatcttccttagtgctctggaatgcatcttcaaatgctcatcagctgatatttattgaatactttctctgagcaatagtggactttaaattgactgtaacctacacacccttttctgatccaatctccagcgaatattttattgtattaaaagctcagattctaagagcttagtattcaagtgcttcatgcctcaaaagtaccttgaatgtgagtagtttattattattcaaaaatttttcccttaaagtttcacccctgggaaaggataagaggaaaggaaagttaggcagtgaatgtaagatggatctgagagataaatgtggagagtgtggaattaaaagaagtaattttaacccaaactgggaagaatagtaaatcatatggtcacatagtgaaagcatgggctttggaagcagactgacttgaatttaaatcctagctcatcaaggcaggtggaaatgtaaaatgaaacagttatttttcagtagacactggagcatgaaaattttagcaatatatatttctaacaggaaaactataaaatacagccaaacatacccagagacaacttctattaaatacctagttgtgtattacaaaccttctttggtatactcacagatgttgaggtcgtaagttgaagaagtctataaatagcactcttctttcctgcttgagtttataactaattaagaaagagatacaggagtcagactgatgagaaatatctatctatctatatgtacatatgtgtgtgtgtgtgtgtgtgtgtgtgtgtatgaactagccaagtagaagggagaatgttccaggcagaaggaaaaccatgtgcgaaggcccagaggcaaggggagcacgaagagtagagaaattacagactttttggtgtgtcttaccatgaggtgcccacaaatgaggccagaggagtaagcaggggcagattacaaaaggctttgcaggtcactttaagagttttcacttgatcataagggttgttaggaatgtttgaaggacagctgtcagggctcttggtgaaaactttgtagcagttactgtcagactccactttcttctcaataaatgcagaggttgtatctctaacataagataagcacttgaaataatggctgcatagcctgtggtcttgtttctcagcatgagtactcagtgatgtaaatcctattttcatccagtgtttaagaaacagagtgaagtcctgagccatgagaattgctcactaactgaggtgctccagctctactgcctggacacagtaggtgtacggccttagccttctttctctaaagagactttaagtctcatcaactggatgggacagtggaacaagtctttggtcagacagtgagggagggtgaaggggtgatagctccttgtgatttctctcagctcaggaaacctgtggccaagatggaggactctagtccatgggacagcctggcctcctcaccatgaccagccagctccatggagagactctggatggtttattcagttgttcaatcgtgtatccacccattccttcaaaaatacactgactgcatgtattagttattactattgaaatgtaggtgtgcaagggtctgtaatgagcattgagggaggcatatattatcgccattttgcagatcccaaagctggcactcagagaagccaggtgacttcctcatatcttgtggctatttaaaagggtaggctcagagttctgactcgagtttgcttctccctaaagctcaggctcttaaaacacacacataaacaagcaaaaacaaacataagccccattgttcttactagagaagttacacaaattctttctcaaaaattgagaaataatgcagttaaatcattccatatgtcttatgatattattttgccttttggataatttctaagaagtggaattgtttagttcaaaggtatagaaaatgttaaagctttagaaatgaatctggcgggctgacctctggaagagtgccaagttaccttccagaaatccatgttattcattatatgacactctaaaagatcactaaggatgtaatgaaacatacctctcagtgtttgttttgtgccgaccatgagctccctgtgatgaatttgaagggctctgttttgatctatagtaggaggcaggaaaaatgaggctttaaaagtagtttagttcatcaagacccactaggaaataaaaagaacacaataagaaagctgaggaagaaattcgatttcagtttacttctgttgtaatcaactgttcattgtgaaatttcacacaattgtgtgttttgtgtttaagagtgagagtggtcctcttaccaactgcctaatgactgacaaatatccaccatttgttaatttggtggaaaaagagtaaatcaagctatgtctgagtcaatggactattcaacagaactggctagttccatcaaaagggttcatttggcaccaccatatgcagggtagaagtgctagaaagaaggcaggcattttatgtagcaagttgcttaaaataaaaacagtgaaatgtatagttttatgtccttaatcatagctaatatttgtcaagcacttatatgaagacactgttctaggggctttcttctctttatgtcgtgaacgtaggctttttgctctggctgtgaggacaacaggtcattttggggtggctggtaagcaggagcagtggctgcacctccctaggaggcaatggagtcccaaagtactaggcatggccccaccggcttcttcttctttttttttttttttcatatcatgaatgtgacttaggtctctcattcttgaatgatttgagatagttttgaaattgtctcaccgagtggcgcctttgtgtaaatgcacttggcaatcattttggtccactcagcagattcccagtgggtttggctctgtagtccttccgggttgctcttctgaggccaggtcacaggatgagtgacctggatattgacagattgctcctcacagtggctgcaccatctctactcacaccagcagcctgagagagtgccctctgtccacatctcatcgacactgggtgaattttaagaataccacccccacaccctatctgatggttctgaggggacttgtattagtcagtgttcttcagagaaacagaatcaataagacgtgtgtgtggatatagagacagagatatagagacagaggaagaaatatagagatagaaatatagagaaaaagatagagcttatctatcatctatcatctatcaatatatatctatcatcctatagatctatctatctatctataggatatctatctatctatctatctatctatctatctatctatctatctatctatctatctatcggaagagaaagagagagacatatcagatggagcctagcaagtctgcgatctgtagggcagaccagcagtctggagacccagagaaaagctgatgtagctaaagtctaaaggcggtctgaattctttctcgggggacctcaatcttttctgcctaaggagttcaactaattggacaaggctcattcacattatcttgtttagtcatttatttttatatatttagggggtacaggtgcaagtttcttacctgaatatactgtgtagtggtgcagttggccacccacattatcaagggtaatctgctttactctaatttacggatttaaaaagctaatcccatccaaaaaaataacctttacagtgacatctagactggcgttcgaccaaatatctgggtatggtggcttcgtcaagttgacatgtaaaattaaccatcaagggacactattcattttgtaaacctccctgcccctgagacaatggcttgcacatggtaagcatattcagtgcatgtgtttctgactgaacgtgtgagtgaatgactgaaagaaagatttgactctgcttttatcttagttctttacctgtatgggatgccatgaaggtcagtgaggaaaatcaccattgacatgttctactatgttagaaagaaagatttcaaactgtgtaagaatcacatatgtatagattgacatattctactacgttagaaagaaagatgtaaagcatttcaaactgtgtaagaatcacatatgtatagaactgggagagcattcgatttatatgtgaataaagagttaagattttttgtgcatagttgggtagcttccttatatatattttatctaaattggcaaatcaattttaagactcagagtccttaaaaatatgcatttgtgtgtcagtaaaagtaaagtaaaaatacataaaaaatgagaggccattgaaatcctaaaagattactgattcaaagtcaaagagaaatgacatctaattcctctggtatatgttagtattactaggtggttaacgttgccagctttggagctgaattgtctgggatcctggctccactgtgtattagcttcatgtctcggtttgctccactgtaaaatgagaataacaatgagtggcctcacaaagctgctgtgaggattaaatgaatcacacacggaaaatgctgaatccagtgcctgatgtatggtacgtggtcaagcggtgttactcatagcacctctcttcctacttaactgctttttatagccagttaagaatagaaatgacatttttaaatattccaattaaaaatatttactatttaaatctatatttaaaataccaaatacatatttaatatcagtatttacatactatttaaacatctcttaatgttgagaggacatattaaattagattttaaaaaaatcaagatttcttcattaggtctgaatttcataagacatgaaatgagattatgacatatggtgaatttttaaacatacagacaaagagtttctgggcatattgctctttatatttgcaaattgggagcttgtctccttgtgggattctacagttcactccagtagaaggatctggctcctgtttatatgtgactatgaaatgttttgagatttcttttagggcaaactctggcctgtgggctcagtctggcccaatacttgtttttgtatgaccctcaggctaagaatggttttaacatttttaaatggctggggaaaaaatcaaaagatggataatatttcatgatacataaaaattacaggaaatttaaatttcaatgtccataaatgaaattttgtgggaacacagccacactgattcatttgtgtcttctctgtggctgtttttgtgctacaactgcagagctgagtaatttcaacagactcggaatggcctgcaaagcctaaaatatttactctctggcctttacgggaaaagttggccagtttcatgcctgtttcatttcaaatgtgggaaaacaaagccgaagaggtgagattcagctttgtccattttggaaactgttaccaggttggggaagagatggaagtctttaaggaaaataaagttcctgaattatgtgtggatttaaccacttcaagctctccttaccttctaagataacataagtgaaaatacttttgagagggagaagtcctctatgagagaaaggcagatgccttcagagttgacaccaaaacattgtcatggcaggtgggtctgctgtccaggcagtcaagagggagcctgtgaatggagttgtgtgatgtgtgattttcattaggtcctaatgcattagataaaatgtgcctaacccagtgggagggtttttcctttggatttccatgctcttaggatgtaatattttcaactgtgtcatcaaaattgatctgctgcaattactgagatctgcagcacatgttatcaacacatcagaagaactaagaagcctttccttaaaaattaaaaaaaatattatcttaagctgccaaccatgaaatgctttaaaagtagttctttgtataacttcataaagtgcttctgagagattcttcccatttacctggctgttgataaaaacccaaagaacattacattcagcttctttgtagatggaaaaagtctggtgggtttcattctctgggcaagtcgctgtttggaaatgtgcattcttctgtccatttgaagttctactttagtttttattgaaatttctttttcagcatagttccttgttattgttcagaataaataccttagacgaatatcttccagaagtcttgtgttttaaacatactgaagtaatgaaacgtgataaacttggtacattgtagtttggattttgcatggcacactgtgattttggacttctgtgttctgatagcttggtcatgagctgaaagggttcaaggctattgcccttcggagtaccgtgctgctgaataacgcaaatgtcagctcaggaacattggaaaagcagcagcagttgaattagcagaatgtatttgagattcatccatgtaaatgagtttgagattcattcattcaccttttgtaaaccagttgacgaaagaaaagaattattgtgcagaaaaggcagttttatatttttataacaatgaaaaaaatgagtaaaaaattttaagaacagttgaggtgaataggtaaattgacaggattagaaactgtgagaattgctttggggagcgcaaaggctactgcggtccagccatactgagctctcaataggtaccacgtactgagacctgtccatgtcctttccacacattagctcattgatcctccctatggcactctaggcaggagttactagctgcattttgtaaatagaacctcaggcactaagaggttagatgacttgcttagggtcacaccgatcctaggggtggagccaggatccaaacctagcacctggctccagaaaatcagtgaggccaactaaaatttacaagcaggtcaaaacaagactgggaaaaaaggacactattgggggttgagagacagggcagagagagttggcctggacctcacattcaggctttggacatttcttccaaatgagagtatataaacatgtatgacattttttggatgattttatataaaaaaattactttatatatgttgtatatatagcatatgctagatatttttgtatatataaattatatacaaaaatttatttatatataaattatatacttatatataaaattaaattaaattaataatcaattaaattaaaaattaattaaattaattaattaaattaaaaatgattaaattaattaaattaaaaatgattaaattaattaaattaaaaattagttaattaaattaaaaataaaattatatatttatatataaattatataaaattcatatataaatatatacaaaaatatatagtatatgctatatatacaaacataaatggtagaatatactatatatacaaacatataatgtatgctatataaagtatatactatattaaaaatataaatatagtataatttttgtcatcttttttagtgtgtttaatagaatgagaccctaaaaaaattggaagtgctgcatttctgtcttctcctgagaggccctatagcatattattgaagtaatatcattatttaatacatatagtaaataacaaccttgcataatgggtagttatttcactttttagtgtttcaccttgcagtatcaattacataacattaattctgttcgtttaaaatattccaaaataaatacatgactatgtcctgactgttttactcaaaaatgagattattaagagaatgaaaagacaagttacagacttgaagaaatcttcgaaaaacacttatttgatcaaggactcatatccaaaatctacaaagaatttttagaactcaatgattagaaaacagctcaatttttttttttttttttttttttttttgagacggagtctcgctctgtcgcccaggccggactgcggactgcagtggcgcaatctcggctcactgcaagctccgcttcccgggttcacgccattctcctgcctcagcctcccgagcagctgggactacaggcgcccgccaccgcgcccggctaattttttgtatttttagtagagacggggtttcaccttgttagccaggatggtctcgatctcctgacctcatgatccacccgcctcggcctcccaaagtgctgggattacaggcgtgagccaccgcgcccggccgaaaacagctcaatttttaaaaaatgggcaagaggtctgaaaagatacctcaccaaagaagagatacagagggcaaacatgaaaagatggttaacataatctatcattagggactgtagattaaaacagcaatgagataccactgcacatctacaattcagtacacgggacaccaaccaaatgctggtgaggatgtggaacaacatgaactctcattcatttctggtgggaatgcaaaatagtacagccactttggaagacaggatgcttgtttcttacaaaactaaatatactcaaaccatataatctagcgattatatttcttggtatttgcccaaatgaatcaaaaactgaagcatattaaaaagcctgctcatgaatgtttacagcaacgttgcttatacttgccaaaacttggaagcaaccaagatgtccttcagtagatgaatgaataaacaacggcacatccatacaatggaatattttttcagcgataaaaggaagtgagctatcaagccatgaaaagacatagaggaaacttaaatgcgtaccactgtccctcgatatccatgggggattggatccatgcggttggccctttggaatctgtgcatgtggaaagttgcctccttcactctgcatcctcggatttcgtgtcccttaaagactattttttcctcagatgttagttgaaactgcagatgcggacctatggatacagatggctactggctgtgggatcctgagtgatttacttcagtgtttttcatctctaaaatggaggaaaaggccatacctaccattaatagatctgtgaggattaaattaagatacataaagtgcctcacatatgataagcagacaaattataaacttttccttttctcttcctatggaattggaggagcattaaggctgttacaggctttgcactccttatcctaactctcccactaccacaagtttaaggaaagtagtaaggaaaagttgagttagaggcagctatgtactgaagggtaagaggcaactaagtctttagttctgtttgagctggtgaaaacaaggcacctctccttacagagtcccactgaagtcattgttttgaagtagaagtgtgtgcatgtattttttggtgcttatttctcttcttcaaatagaagaaagtacataaggaggcaaaacccacaaacaaattcgaaacatttaatgaaacctctgacacacacacatatacatgtcatgtatacacagcaattcagctcaattgcaagtaaatgaaaacatgcagttctcccctatagatatttctcatgttggctgaaatagcctgctcgtagccaaatggcctcttgtgttatttactcttctcctgttctgctggtgaagaaggctgtgaacccccattccagtacagagaaagagtctctgagtggtcagcagcagcagtagacacaagaggccattccccatggaccagtcagggaagccacatctgagttagtgctggatggacaaagggacactaatatgctatcaaaaggtgagtcttggggtgatagaacttttcagagaattgcctttactgagttatattttccggcaatagtctgcttttatggaggaagagagagacaggaattacttgagcaatcccgtatctttggtgaagcctccacaccagtttgattgatttcttggtcaagaaataaataacaacagattctgtgtataacttaaagctccaatatttttagtaattagttaattaattatatttttatgttttgccttagatggaaagctttaatcaatcttctgactcagaaattgggtgcttaaagacctttcttccatcattttttccccaagtgatctttattctttatgattcttaaatgtcttaagcaccatctagtctataagccccttcaaaccctctcaaaagctggtaagaataaatcttaagtaaatgtaaaaatagcatcatatcctcaagtggacagagattctccaaacctcttgatctcaacccttttatttaaatcacagagacatttggttttagaactggaggggtcctgtattacagattttcctgaaaaaatgggaagaataataatagtacctgctaggtaagattgtccgtagaagtaaattacataaagtgtataaaaaaggcttaggctaatgcttggtcccggataaatgctcaataaacggtaccttttattgtaattttctttcaccaggatcgttagcatgttctatgataaatgctgcagatctgcagtaataaaatagctgcagggcccatgtgactattgaaatttaaattaattaagctaaaacaaagctaacatttcagtttctcagttgcattagccacatttcaagggctcaataccacacatggctagcggctaccataccaggcggtgaaaatatagaaccttttcatcatcacaggaagctttcatggacagtgctgctctagagtatatcaatggcattggaaattcataagccaagagtgtctttcaaatatcagctaattaatgaactaatatcacgtcagatatcacctctataacatttaaaaaatactcattgtgctattatggctagtgctgcaatgaagatgaaatcaacctaaatgcccatcaatgacagattggataaagaaaacgcagtacctatacaccgtggaatactatgcagccatgtaaaaagaacgagatcatgtcttttgcaggaacaccaatgctgctattattctcagcaaactaatgcaggaacagaaaaccaaatactacatgttctcacttataagtgggagctaaatgataagaacctgtgaacgcaaagaaggaaacaacagacgctggggtctatttgagcgtggagaatgggaggagggagaggagcggaaaaggttaactcttgggtactgggcttaacacctgggtgatgaaataatgtgtacaacagaccctcaggacatgagtttacctatgtaacaactatgtaacaaaccttcatatgtagcccccaaacctaaaataaaagttcaaaaaaaaaaaaaaggaaaaaaaactcattgtgagccaggcatgctggctcaagcctgttatcccagtacttccggaggctgagatgggcagattgcttgagatggatggcaaaccgcatctctacaaaaaatacaaaaattagctgggcatggtggagcacacctatagtcccagctacttgagagactgaggcgggaggatcacttgagcctgggaggcagaggttgcagcaagcctagctctcaccactacacttcagcctgagtgacagagtgagaccatgtctaaaaaaataaaataaaaataaaaatactgattgtgagatgaattaagataaacctataataataaaaaatgactagaagattagatgtttatctagctggtaaaattaattgggcagtgaaatgcattgctattgcttttctaatttgtagaagttgtctcagaatatgcatggagagtacatacatgagcatgaatgtctgattctgccagagaagcttaaacatatatggaattgtgagatatggtaaaggaaaggaaagcctggcatcatcttggcaacaggctgagtttttttctagtgggaccatttaaggacctgggagagtttatcatatattgttctcaactggtgaagcggagtttatagatacttgatgcaatttcaggccacatccagccaacaatgaattactttaatgtaattggtgaacattaactgtgatctgaaaaagcaaaattaataactgttgcttatttacaatgtacatggaataatttttatcacatgctaaattattttggggaatgtattatctaattagaaagttatcttagcattcagtttcgagctcagtgattgccacattataggctcaataaacattggtgaactttgtctttgagattttagaaatggttggcagaagcgatgcaacatagcattgtttaaatggtgggtggcaaccaattggtgattatggaatcagtttagtgggtcatgaccaacatttaaaaagtgaaatgaagtgaaatagaatggaaaatacattgcatgtattaagggaaaatattgtgttataaaatgtctgctttaaatatacgtgtatgggcatacagcgtcacaatgaatttttttgttctccgtggattgtgttaaaaaaaatgtttaaaagcaactgatgtagaggaaattcaagtaccaattggctagttgaactctgtgttggtgatgataatggtgatgatgacaaaaacagctacagcttgactgtttaccataaaccagtactttttctttttttaaatacaaattattttttatttggaaaatgctttatataattcagttatgtaataaagaataaaatgtaagcgttttctaatttcattttcataagcacccggtatggtaggtgcataacattcctagtctatttgtgagctatgtgcatttcagtgaggttaaagtgcagttcccaaggtcacacagctggtagaagttgagatgtgatttgaactgactgcctctagggttaatggactagaatcaccatgttatactttaagaccctgtagaacaaggcagttctcaaccacttgattactgcttaatgaccctgtcatagagcatggcaagaggaaatgaaactaaacttgattccttctagttatgggcccctggtctcatggcagcagtgcattactgtagaaagccctgggtttagaaataggtttgagggtgatgttgagcagttgctaacctttttagtcttggctttcttcttgatttcctttattctttttttgtagagctgttgtccagccaggggccattgcacttaaatgcacctactgtgcacttcccacctactaatgcattgaatcctcacaggattccacctagtggtcctgctagcatccctgttctactggtgtccaaactgaagcctggagaggaccagtaacttgcccaagctcacacagctaccatggaattcatcccatgtagacctgctcctgagctatgctcttaaccatatgctcttaactgtggcacaaacaagatcatccagaaatgttaaaggagttcttaaagtctccccctcaagcctttggacacctctctgagtcccttctgactctccatggaataatttttatcacatgctaaattattttggggaatgtattatctaactggaaagttatcttagcattcaggttctagctcagtgattaccgcgttataggctcaataaacactggtgaactttgtctttgagattttagaaatggttggtagaaacgacgcagaaatgtctgctcaatagtgtcataccatctctcttcttgcttgctaactccatttgtggaatgaaatatggcctcacccttctcatgcctgtagaagttatgctaaggtttccctcagcccagagaagcaatttcccaaatgtgcctctcttcctaaacccatttccgtgtgtcctcacattccctagcaaggattaactatttttatttgcttattcataaataataactttacagcatctccaattatctttccaaattcttcttctgtttcttccagtctttgttaggcttaaatttatcagacttaaattctcaaaaaagaactttttaaaaataatacatgtagtaatgtttcaagtgttgttttaacatattctgcttaaaatgaaggtcatcactggctgcaagtaagtgaacatatgttaaaatttcatgtgttggtgctcagagattctaataccatttgaatttcaagaatttgaggcaaactagagtctttgaaaaaatgcttaaattgtttttcttccccgtaagaatgtaaccagagtccttgtctcagggcttaagatatcttctttctggcttggcctttacttcaggtagggagagggaagcaaagacaacgagcagtaatgtaattttctccttccaagccccctaacgccagcctgacttaatacaacacatacagctgctgctgctgcttctgctgctgcttccccttccccttccccttccctttccccatcctcctcctccccctccctgtcccctgccccttctcttcctcctcctcctcgtcttcctcctccttctcttcttcttcctcttcttttcatttcctgtctgtaatggagatgaacagctcctaactaaccgcctaacattttaccttttatacttcaagtcccattctagttcactccttaatagtctcaattcttttgacctttccttctccatgcccccaaatccacagcctttatgttacagcattttgcttgcatccagattttcaacctattaatgtcagtctattaatgtttagtcaagaatacagaagcttgctgtgttaagggcaagagagccgtcaactctatggaaacaattacagaaggcagcaggaagaacaccaaaaacaaaacaaaacaaaacaaaaaactaaacaaattttaaaaactcgaatctctttcatgctaaagaagagtttccaaagcttaaactttagcaaattatcatcctcaaatggaaatgggtgaagaacacacatgagccctgcatgaattgggaaatacagttaactgctcataactgttaggtgaagttcaaatatgaataagcccatgtgaccgaatgacttccttgtgtgagaggtgaggttatactttggtcttaatgcatcgacagagcagattgaagataaatctcagctgttctggttggagtggtatgttggctactttcttcatgttctcctcttccttttacatacaagactggactgcatctggctcttccacattggaatggaaagataaggggagccagaagttttgatttggtgtcactgttgttagatagccttgaactctctgggcctggcaggtgcctgtaacatttttccttctggatgtttctgtggatttttcagaaactacccaccccctaacatcccccaaccccctctgctttctgcccttaccctttgccaccctgatcatggggtgttttcatctctagcttctgcgatgcagataatgtgccctctgtcttcactgattccttcttcaccccaaggagtctggttggtagtcacctctagctttcattagttgggggtctcatgaaatgtccaggagacccgacaagacataacctgatgtgacctcacaccagctctcttgtgagtggctcacttctggtctgtgggacacatccaggcatcctctgcactcagaaacttggattccaacacagctacctctccttgagctcatgtcagaagccgcagtgtatcacctgctttaggatctgcatccacaaagtcttccaaactgtaggagccccatgtgaagctctctgagtggtcccgctgaattccccttcacctggcttgaagtgagaatagacgctccctaaacctttcccaagggttaaagtacagctctctccaaagaaatccttctcacatattcttttgttagtagattttctcttgtctctgactttgatattcttgttgtggctgagaggtctctgtcttctaactggttcttgttcattaactttgaaattctgccttggagtctattaatctctaaactgagatataaaaatttcccattttggcatcctgttatacaaataacaagtacaccaaactctttgaggactgtgtgtactgttaggcctagaccaagctttgctagggcaacatttgctctcaagggattttagcagggaattcttccttggggaaaagcctgttttaaaaaccttctacccaataggtaatgctctgatgggtggagcttgctgccaaatggtttaaaacccactctataatagtaggtgatttcgcttttttggttaaagagagaaaacatttttcttcgatcaaaatatccaagatcattaattgagtgctagcagctgaggcatttcctcttgattgttgcctttgcattcagactgctgtgtggttccagcttcccttttggactgggacaggccaagtggagaattctgagctcaaaaatcaactaggatggcaattttcagaaagcagttctgattgctttgactttctcttgagctcctcctgactttgttcagtgtctgcattccctgtatcaaactggctttgaaagagcctcctactctctaggcctttggtcattacaagtgagtggccccagccatacgtggttcactgtgggggttgtgttgggccattctgttaggtctgcacagagttttaaaaggcaggtcatctcagctcctctggttcaccttagatcctgcagttcctgcatgctaactgcacacatcctgcaggcatttgggcttcacttcttggatcttctaggacatcttccagtgtgaattaaggtaaactgtctcaaataaaccaacatgcctttgagttattgggagataaggtcaagtgtttttagttgtaactttcctttccttttatccatgatttgttgttgttgaggaggagtgacttttggaaatacttgataagatagaaaggggacattgggcatgtgtcactatgtggcacaaaggctgcaaaggtgaggaatagagacaaaagagtgcagataataaaagaaaggagataagtagatatttgctcagatatgctattttctcctaccagtaagagttgttctttaaaacctgaattgagaaattagcagaataggtgagagatgactgagaaggtcttctggcccatggtactttaataggacagaaaattgcactgggaaaatacacctgtaacctaaccaccccttaaacttttacagggtataaccacatcagcgcccagaaaccaaaactcgcccatcagaccacagcaaccctggcatagggagcttcccattggcttggtggtgtaatctttgactagaaagtgtcattttatgagtctggctctgttatgaagatggatgcctgtttgtgctcaagactgtgatggaggctatgtaatgctgatcatagtggtaggaacccacttgggtctgtgtcctcatctcaaacccagaatcctgttgggaagcaaccatagttctgctcatcccaggatcctttctggagtatgcagcaagctcattcattcttgcctgttttcccccattctaatcaggataacagctagaggctgagtgggtgttctttcccagctacaggttacctttctctaggttgatacacaagctctttattgcagtatctgttgaaaccttagatttctttcttttcttttcttttttttttttgatggattctcactctatcacccaggctggagtgccatggagcaatcttggctcacagcaacctctacttcccggtttcaagtgattcttctgcctcagcctcccaagtagctgggattacaggcacgcaccatcatgcctggctattttttgtgtttttagtagagatggggtttcaccatgttggccaggctggtctcaaaccttagatttcaactgtagtagcatgttacaataagaagtgagcaaagccagtttttctttgctggtctgtttagataatgtcattgataaaaatagcaataaacatgtatccaatcctcactataagctagactttatgtatgtaaactcatttaatgctcacaaacccctaggaagtacatgttattgcatccctgttgtcttagttccttttgtgtgctgtaaagggatacctgaggctacataatatgtaaagaaaaatggtttatttggcttacaattctgatggctggaaagttcaagattgggcatctggtgagagtctcaggctgtttagactcatggtagaaagtgaaggggatcaggcatgtacagatatcacatgttgggagaggaagtgtttgggggtgggtagtgtgccaggtcacgtgggaactgagtaagaactcaacctgagggggagcattaatctattaatgagggatctaccccctttccaaacactcccactaggccccacctcccaacatcaccacactagggatttcattttgacatgaggtttagagaggatgaacattcaaatgatagcacctgttttacagatgagtaaactgaggcacagagaggtcaaggaactggactgagctcatctagtaagtggcagaatagggagccagtcccaggcagtctggctccagaatcttagttcctattcactacttcccaagctctatcatattaatgatataaaattcaaatgagattgtatatgaaagttaaataaactccaaactattagacaaatgtcagtgattgctctctcttaggctccttggggtgaatgttatagatacaaatgtcttccctctaaactgtgttatttctttctgaagacaatgcaagtgtgataaagaacatcagcaacccatattctaacaatcatcattatattccttttctattgctgtgtaagaaaattaccacaattttggggctttggcttaaacaatatgcatttattatctcagaggtcccaggggtcaggagtccaagtacagaggacctagcacaggctagctaggtcctctgctgagagtctcaccaggcagaaatcaaggaggtagcagggcctgtgaatcctcatcaaggctcaagttcctctttgcaacttactggttgttggtagaattcatttccttgaagttgtaggcctgaagtccctgttttcttgcacgctgttggctggggtcctcacttagcttttagagggctcctgtgattccttgccaagtagtccccataggcaggttgcaacacagatgtttgctttcttccaggccagcaggtgtgtgtctctctgacttctgatccctctctagttggctagtatggagtgactagcacatcaccatttgccatataatttaacctaattgaggaagtgaccatcctatcattcttacagattccacccacactcaaggggaagtgatgatatatgatgtgtacctcagagggccattctagaattctgcccactgtgcttgtgtttttgaagctcctgggggtttcagccacatggctaaagtgaattgtgggaaaattgtggaatgggttactaatgaatatggatatgccactgaaatgtattcatgtgctattctggtgaatgctgcagaagctggagccctgccacttagggcttctagggactttgctgctatgggaataatcaaggccaccaaatgccaggtggtgtaaattgccaaagcacttcctggacttgatcctgatgaaagttgatgcagcatccttgctggcttacaggttcgctgtgtttctcatagactctgcaagccccatgcagagcattgtgtgataagcctgtcttatccagagcagggattgttctttgagagaatataattattgcctctgtcttgctgacccatcagcaattgttttctttccccgtggcgtgggcagagtctgtgtgggaaggtactggtttaatttctgtcacatctcacttgtccttttcctaggggcaatgtaaatctcaaaattgatgcagctgggaatcaccattaggagctccagggtcaatttggtatagtaaggcaaaggccgtcaggaaatcccaatgagtcatgtggcataaaaccctgtaataagcagcattcttcttcccagactggaattttgtgtgtgaagcttacattcctgcaaactgataaactgagatgacttatgagtgaaaggggggaaataaagacaccttatttggatacatggtgggctttttgaaacctctggtattgaaataataaaaatcttttattgatgtaaaatgcttttatttataaagtgctatcagttcagatccaggattgtttactcttttgttttcttcatgaaagcaaaccctacatctcatggtaataaaggaggtatgccaaaatgtgtgcttcagtgtgttcctagatgggcatgctaagaactgggtcctctcaagttctaggctgaaggcagtggcctatcaggaatacttaagaattggtaccaagagcatttgtgtatttgttattgtaagtgtaatatatgttaatcaaaaaaaaaattggaaaattagaagaaaggagaaaataaaaaatgcccttaatctcaacacctagagatagctcctgctatttatatctctaggagatagctcctgatattttgacatatataatacatgtatgatatgtgtattatgtctatctacacacacactaaatgtatacaacatctacgaactataatttggtagcttcatttaaaaacattttacaggtatattttgagatttttaacatgttcttaaatattctatagtataattgtatgttggttaagagcatggaatctgggccctgattgcctgagtttgaatgaatactggcttaacactatttgatttcatggccttgggcaagttacttaacttttctatgcctttcttttatctctgtaaaatagggacaataatagtacttatctaatagaattatagtaaagtttaagtaagttaatatatttataagttgcttaaaatagagcctgccatttaatagtgccatataactgcttgcttttgttagtggttacgtacaattctatcttctgagggagatgtaatttatttaacttatccattgtttgatatttaggtgttcccaatttttattattacagattatacaacgcttacacatgcttttttgtgtgccgactaaaaatttttttctttaagttacattccaggaaataaagcctctggatcaaaatatattaatctttttcaaatttctgttacttttttggcaaattaatcttataaaatgttgaccaatttgtacttccacctgtggtattgagtgtctgtttccccttatcctcatgtgtcaaggcaatggtagtatcttatattttatatttttttgttgttgttgttgttttttgagatatcacccaggctggagtgcagtggcatgatctcagctcactgctgcctctgcctccagggtttaagggattctcttgcctcagcctcctgaatagctgggattacaggtatgcaccaccacgcccagctaatttttgtatttttagtagaaatggggtttcaccatgttagccaagctggtctcaaactcctgacctcaggtgatcctcccgcctcagcctcccaaagtgctgggattacaggcgtgagccaccatacccggcctcttatgttgttttgattggcatttctttgattgcaaactagatgtgtatttttccatatgtttagcagtttacatttattctttataaattattgcttcctgaactttacttatttttacttttctcttttaagtgaaaaaagatatatatagtgatatatatattaagtattatttatttattttttttctgtcacccagtctggagtgcagtggttagatctcaggacactgcacactgcagcctcaaactcctgggctcaatgatcctcctgcctcagccccctgagtagctgggactacaggtgggcatgattacacctggctaatttaattaattaattaatttatttatttatttatttttgtagagatgggccttgttatgttgaccagactggttttgaactcctggcctcaagcagtcctcctaccttagcctcccaaagtgctgggattacaggtgtgagccaccattcctgaccagcttctgatcttctactagagatattttgtcacagtctctgtgttcttcaaactgtttagtattattattaggctatgtttctatagcgacaatataattttgtgatataagtaacatatgcagttagttggggaaagggttgccatgaatgtcactagaaatgctgcaagaacatgactatgtcctgcctctgcaacttcagaaatcattttgaatgaggaggcttttgcgaatgaaattttggtgaaaatttttatctttgcaattgtggtaaatattgtgactacctgggagagaatcttttggttcattaaagagacaagtagttacctaatgagaaactgtcagtaatctcatggacatgtggaagaatattcatttttaataccctagtcaagcagagggcttcaggaacaaacgctgattcactgttttaattagttcctggattctactgcctttctctggactatggagacctctggctacatagtacactgttgctgagtgttggatctcaacagaagttgatattctttgtgttttctgattttctccatgtgaatcattgtctcatggcaggctaaaacaagtgtgataaaaatatgtttttaaaataacataaaaacatttaaactttggaagagggagggaatgtgttctgttctggaaaatagaccaatatcaatgggtaaaaggtcaccattttgggttaatataaggaagagctttgttattacaggaagagtccacccatagcatggctcacctttttgaagcagtcaccgagattcttccagcagagaccaggtgatcaaaaagtacattactgaatttaagaggaaaaaggtggggcccatgcactgggcgagaccttgcactagattacttctaatatcgttttcaactcttggagattctacacttacgtgagtttttaaaaaccatgtgcgtacttatctgaagtagtcaaattcatagaaataggaaataggatggtggttaccaggggctaagggcagggggaaaagggatgttgttgtttattgggtatagactttcagatttgcaagatgaagaagttctagagggttgttacacaacaatgtgaatacaatgaacactactgtgcacttataaatgtgcctactatgaggttagccctaggccaagcactgtaggggacgcgtacgtttaagacagtccctgctttcagttgtgtcacggtccacttctgctattaaatcaaggatcctgagcagcagcccagaagcccacgctagccaaccatgatgtcatcactgccactgccattgaaggcactgccagaagcccaaagaaacaaaaacactcctcccttcttccggtcttacaatttcctgctagtgcccccatgacacagcccaataagaagccaattggtgagttattctgagaaatgtgtcatgctgctttctttccccatcactatagaggaaggtataaggatgaatatgaatttgtgttggcgatacactgttaggcacagtccacccctttgtctctttttcatccatacacagccctccacccatatataaacttgataaagcaacaacagcaacattataatgcttctgttgatgcaattatcccttgcacaaatgaaggcatgctcactagttccctgataagggggataagaagtgccattagttggtgcatttacatttatatgttgatgatgttaattccccttacaggttaatcaaaatctcatttatcatgtaacttaaaagactaaattgtaaagttaaccacctagtttgtagttaacttatgtgacacactccttgtataacagacacacttggggaaaggaaaaaggggagagtgagttctatatacaaatctgtacaaggaagaaaatacacatagttgctatagcccttacttctgtaactgatcacaaagctgcgtgtgtgtgtgtgtgtgtgtgtgtgtgtgtgtatttagagggaggagagagagagcaagaaagaaagagaaagagctaggatttacatttatatatatctatatctatatgtcttctttcttcccgtatcaactcccatatgcttttctctttaatcccttggttggtgaggattctttttctgaagggctgatgcaaatctttactcctgaaaagtctgtgtccttagacatccctcctttgttggtgtagtgaaatcttttattaactttactactggatatggaagtaataaggcaccccagagaatcctctggattacagacatctttcttaatgcctccattatccagcaacaatcttattttagcttagtaattgggaccccagttagtgcagtagaacaatttttgtttgtacaatggcttaaggagtctgaatgaccaagtagtaatctcaaattttagttcagtggaaccattcttgtttctgctgctgacttttattttcttggaaatgaataactttaaaccagcagagcccaaaatcttaggcacaggtagcaaaattttgtgactagcttattaggcataatagttagaatagactatcccattttaatttttgattctctgacccatgtattatagatatgggaggaataccactctctaggggttgttgattcaaagcatgtactacatcctgtaagatatagttccataagctttcaagaggttatctctcagttagtgacaattgagccttcagtaggtgattccatcattctaccaggttagctgcttctggatgatggagtatatggcaggactagagaattccgtggctgcaagtcaattgctgcacttattttgttgtgaaattagcgccttgatcagaagtgatgtcttgaggggtgccacaatggtaaataaggcattttctaagtatgttatcggtggtacttacaaaaggcaaacccatatccacaggaaatgtttatttccctaagaacaaatctttgcccacttcatactggaaagaatccagtgtaattcacgcaccatagcatgactaactagtccacctggactcattgctggcccctgctgttcgcagggtgaacacacagtaatggtgctagccagattcacttggtgagcctacacatagactcattgattactgtcatgaccactcagaagataagtccatggagaagttactagggtggctgggaagaactggctggctgacatcctcagaatatgttatcttgtccccctgattattgacagccttctctgcagtggacgtccttttgtgagcatgcacatgagatacaaatatttcccactcattgccccttctaagaggtcatccatctgcctattcctcagtcctcttttttttttttttttttttagcagtttttctattctgttctttccaagtcgatgaccatctggccaaatcattatccattatgtatgagttagtatagatttgtacttctggccatctttcagtctagccaaaacagatatccagatgtgttatgaagttctgccaactgggaggattttctctctacgctatctttcagggccatccctgagtggatatacaacagcttagttctagctgttgctgctatacaatggagtatcatatgcaaaacatatccaagtcttttttttcgctatcatcatctggttacagggaactccttttgaagccgtaagtgtggtttgagagagaggaagcaatgtatcaggagtaggtggccgtaggaatctgagccatcaaatcatatggcttacttgtatccataggacttgctacagacccatcttatacaccacttccacttggtgacggagtgtgacttcacttagctgattttatggtttggtggattaaatgatgaccagttagtttatggtgggcagctcagctcatatggtcatcaagtgtcctagggcaggagttctgtctccacaagagcctgagaatatactttcaaggggaaaaatcagcagctgttactcagagagagaaaattagcagaagaggctggttttgctccaaaactctagtactctaagccatgattcttacatagggcttactctaggcttgtacacaatccccttttgtacatggggaaatgaactacacctccagggatcacagggagatcagaggccacggagttctatgattaatgaacatctttcctttcatgttttcatactcaaatcctatttattcctagctaacttttttctaatattgatcatagcaatttattgaatatatttttgctcaccttccttcaataggaattattattgccttatttacctgttatacttctgaaaacgatcagatttttcacgttttcaaggagcctgatggagatatttttctttactctttttaaatcaaactacatcattataaaataaaacacagatataacctccactgcacatcaaatatgtagcatcatgaattagcataaggcaaactcatttgtaactaccgttcaggccaggaaagagaacttcaccagcctccctagaagtctcttctgtgtgacctatctccatcataacccccttcacttcataaataaccattacctggacttttatatcagttgcccagctatgcatctctaggtactatagcttagttctgctcatttaatgaacgttggtatacctttcttttaatttgtaccttcctgctccatccctttatttttccttatcgtttatctgtggatgaacccagccttgtgacttgtagagtttctcatagactagattttgctgattgcaatcttacggtacatttcattgtgttcctctgtatttcctgcagcatggtggctggaatttgaggtttgatcaaactcaggtgcaattcctttggcaagattataggtgtgtttttacatcaggaagcacataacatttgtgttgtttgtctttttgtaatattaacaatggttaatgcttagattcatttagttattggggtttctaaggtcatgatattccattttgactttttttttttatcatttatcacttgggatacaaagaattgctcccctttatctactttatattttatttatttatttatttatttattttttgtgatggagtctcactctgttgcccaggctggagtgcagtggtgtgatcgtggctcactacaacctccacctcgtgggttcaagtgattctcatgcctcagcctcccaagtagctgggattacaggcgtgcaccaccacatccagctaatttttgtatttttagtagagatggggttttgccatgttggccaggcttgtcttgaattcctgacctcaagtgatccgcccaactccgaaagtgctgggattacaggcatgagccactgtgcccagccccttatttactttttggttacccagtgatgtagttcatacagagagacaagataaatatttgattctttttatcgaccacgtttcaaaataataagttggttctgtttcatcctccaaaggtttatatacatacatgaacttgtggacttaagcatttttaatgggttccatttaattgcagttatctttctgaaagctcaaattattacatctttgaccagtggaagcctttgaaagttggcttctgtttgttttttcctggatgttattcttggatgttctttgtggatataaaactcttgtgaactgaaaaatcaagaactacttctccagctcaggcctttctctgattcattcatggccttaaatgaccagggaatatgttttgaagagtggggcacaccctctatagaaagggaatacatggtttctgtttacaaatattgctggctttgtctttagagaccagaacgctggcttcctgttgaaccattctcctctggaaatgagattgcctcaccagtgttgttcaccttttccggaaagatctgatattaatagttttctctagaataacttattcttttaggaggcatgtgctcttgtctagacaagtatctggaataaaactgaaaatagttgaaaacccgccttttaacattttcccctgaaattttctatgcaacccagtaaagatctataaataaactttaggaataatataattaatcttattaaatgtgagagtgcttcaggcttctttgagagcagtagaaggacttgcattaaagcgagctgtgccttcaaaatgtaatttctcgtcctgaccgcaagcttatcacatccctccccttttagtgacctgcttttccttcagctcgaatgctgtgtttttggttttcacctctagcttggatagttctgaacattttaactctctcatttttgttactgtgacagcgactttatggaaatagggctgtgaaggtttttatgatgaaacgttgacaggagaaataatacttggcccagcacatgaaacagaatcacccacaagaaagaataaaggcgattttgaaaagcttatgacatcaatgtctgtgacaatttcttttggcttatagcattcatgtttgcaggctaggtaatatcgattttcacttatgagttctattgtagaagacccttccctctgtaaaagatctgattctctggctttcagtcttttgcctgacattcaaggcccgccacagacttattcctgtcctccccaaaaacacttagtgacttcctgttgcctgttggattaagtatacacttttcactgtgattccatttttacctctccaggcccatttccctgtctttcctatggacatctcttcagatcagctattttagttgcctccacttcctggtacaccctacattttactactttggtctttgctcacacagtttcttctatccagaatgactttctcttctatctctatctgcagagatcctatcattattttaaaattcctcctcctccacgaagtccttcctgattccttcaaagaaatatcactcctccgaattcccaggtaatgtcttcttgacagtttctttatattattttgttatgtggttagctgttgttgctattatttatgtgtttgtcaccactctggggtgacaaccatacatccaaattttcctgggacactcccagtttatacctgttgtctcagcaccttgtctggctagtacccccctttactctcaaaattatcttggtttgggcaatgaattaaatggtcacctttggaataaatgaccagaaggttggggctgcatcatactcatcttttactttctggtcacttagcacaaggagcagtgtaattcacatatggcgggcaaaggaattagtagaaaagagactggcttgtgttggggcagggaccactttgcctgggtcatcaggaaatgctaaccagattagttttgattcctcccagagatagtcttcctaatggcactgcccaggggctattattttcccatcagaaggttgggttccccaagggtttgataaacaatcctttccaacatgaaggctgcaggcattgtttccccctcagtggctagtgcatttagagcttcaaaggagtatacttgggcattgtgtagaatatttagttcacatgtgaaagaggcttgctttatttatttgcattcctttttatttaaaaaattaacctacagaaaagttgatagaaaatagtacgtagtcatactctcttcattttgctacatttgctttctttctcttgctttcttcctgtatatacacatagactcaagtttgtgtttaagtaagatgtatgcataactgttcatattcgtttcctgacccacttgaatatagactgaggatatcatgatacttcacccttgaatacttctacatgctcctcaaaataaggacatttttctgtgtaaacagtatcattattacacctaagataataatttcacagaatcatctcaaatatagtccatattcaaatttcctcaaacttgtttgggatccagaatccaaatcttatcttgaattacagttcccataatccctttgtgtcaggtaattgaatcatgggggcaattacccccatgctgctggtctttggatagtgagtgagttctcacaagatctgatgaatttatcaggggcttttcccaccttttgctcatacttccccttcctgccactgtgcgaagaagggtgtgtttgcttccacttctaccatgattgtaaatttcctgagtcctccccagccctgcataactgtgagtcaattaaacctctttcctttctaaattacctggttcagatatgtccttacagcaccatgagaatcaactaatacagtaaatttgttctgggtgtagggcgctgctgtaaagatacccaaaaatgagggaaccactttggaaatgggtaacaggtagaggttggaacagtttggagggctcagaagataggaagatatggaagtttgaaacttcctagagacttgttgaatggctttaaccaaaatgctgatagtgatataaacaatgaagtccaggctgaagtggtctcaaatggagatggggaactggttgggaactgaagtaaaggtcattcttgctatgtaaagaaactggcggcattttgccccgtcccagagatctgtggaactttgaacttgagagagatgatatagggtatctggcagaagaaatttctaagtggcaaagtgttccagaggaaacagatcataaaaatttggaaaatttgcagcctgatgctgcaatagaaaagaactattttctgggaagaaattcaaggctgctgcagaaattcgcataagtaacgaggagctgaatgttaatcaccaagacaatggggaaatgtctccatggcatgtcagagaccttcacagcagcccctgccatcaaaggcctggatgcctaggagggaaaaatggttttgtgggccaagcccagggcctccctgccctgtgcagccttgggacatagtgccctgtatctcagctgcttcagctccagccatggctaaaaggagccaacgtacagctcagactgttgtttcagagggtggaagccccaggccttggcagctttcatgtggtattgggcctttgggtgcacagaagtcaagaattgtggtttgggaacctctgcctagatttcagaggatgtatggaaatgcctggatctccaggcagaagtttactgctggggcagagccctcatggagaacctttgttagggcagtgcagaagggaaatgtggggtcagagcctccactggggcactgcctagtggagctgtgagaagagagccaccattcttcagaccttagaatagtatgtccactgacagcttgcactgtgtgcctgaaaaagccacaggcactcaacaccagcctgtgaaggaagctgacagggtggctgtaccctgcaaagctacagatgtggagctgtccaaggccatgggagcccacctcttgcatcagcatgacctggatgtgagacatggagtcaagggagattattttggagctttaaaatttaattactgccttgttagatttcagacttgcatggggcctgtaaccactttgttttggccaatttctcccatttggaatgggtgcatttacccaattcctgtacctctattgtatctaggaagtaataacttgcttttgattttacaggctcataggtggaaggaacttgccttgtctcagatgagactttggacttggacttttgggttaatgctagaatgaattgagacttttgggtactgttggaaaggaataattgtgttttgaattgtgaggacatgagatttgggaagggccaggggcagaatgatatatggtttggctgtgtccccacctaaatctcatcttgaactgtagttcccatgtgttgtaggtgggatctggtgggaggcaactgaatcattgatgcagttaccctcagtgagtgagttcttacaatatctgatggttttataagggactttccctgcttttgctcatacttctccttcctgctgctgtgtgaagaaggatgtgtttgcttcccctaccatgattgtaagtttcctgaagcctccccagccctgtggaaatgtgagtcaattaaacctcttttctttataaattacctagtctcaagtatgtccttatagcagtgtcagaatggactaatacactgctgtccttgtggcaccctccaaaatgtatacctgtagacatacgttcctcctctgcacaccttttgttatacttaaggatccacatgcctcaaagatataacatgatttttgcccacgaggagtttgtagtctagtagaaaaaagaataagatggaaatgcgttatatatcatgggtgctccaatttaattctgttcagggcacagctgagttgcaagggaggcagtggacttttctacctgcatggctggggagaacagaatattatgtacagaaggagtaaggctggagctaccactcattgatttttaaacttttattgagtactaggcactgtgctagagtctggggatgaactttgaacctgaaccatctgtacttcacagaagtgagtattcattgtgggtgatgagctttgaagtcataacctcaatattaaatatataaccatcagttgtgataaatgcaatgaaggaaaagaatagtgaactgcagagcatgtagcaaagaccaaatttccttctggggtgggcatcatgggaggtctcactgagagagtcacattgaccttaagccaaataatgaacctgaagaatgagttcaagttaggtgaatgaagagtagctagcgaggggcctccatgttgaaatgtctccactgaggaaggaagcagaacctatagagggctggcacagctagagccgagcctaggaggagggtagtgtcaggttgagagagaggcaggggacaggtcatacagggcccaaggaagaagttttcctcttgaaaaagacataatggttacatgggctcttttggagttgggatggggagcaattggtttgttaggacatggagaacaaagtatcctgataattggaaaacaaagcaacttgacaaggctggaatatggggtgtgagggaggacattgtgttgaattttgagttcttcttagaagcagcagggagccactgaagggtgagtatgatcagaggggtgatgtatcaaaagtgtatttgagaaagagaaatcttaaagatgaacgaattacttgaagatgctgaaggctggaggatcttgcagttgtccaataggtagaggacgaaggcttaattaaggcaatggaaatggggtggagaccagaagacaaagttcctcagtaggcactatctacaggatttggttattgatgagaggaggagaaagtggagtattaaatggtgttcaggctcctggctatgtgatgagtggaaacggatagcaagagaaggaattgttttggacaatcgatggtgttttgatttgcccctgataagtgcccttgataagtttgatttatacccagtaaatggtaagggagatccagcctgatgttacataagcaactgattagttcatgtttcctgggcttgaagaagttctctctgaatatttttgatctattaacatggtatttattaagcaagttggaagcatgcaaactatttataaaggagtacttgcattttacaactgacagattgctttattcggaattactcatgacaggcttttttgtgtgtgtttgagagacatttgactttgccacagttttgaaaatatggtatttctggtatgtttatattgtgggttgtcaaaaacagttaaatattacaattaggtttgctgtgttctgtttttttcccattcagttacgcatgaaatatacaagtacaacatctggcattcttctttataagaactctggcaaaagagcaacaaggattagattcagcacttgtcaaatcatccaattgtaatattttcatctagagttgaatctgaagctgggtgaaactgccatgtaaagaggagttctgtgtaatgtcacagaggggccacttaggagaattccttttatggttggggcattcttgagatgcctggaatagcccatttgtatcctatcattgagacggaaacacagctaggacgggtcaaggcaccacgatgacaagatccacacaacacttcttttctgttatttgtcagactagagccctggttggctgataatggcagaccttccttctttacttcatttttctatggcaaatccttggtctcggaactggaaagcccctttcctagcttgaaggccatatattcttagaactggaagggacctcaataactgttttaatccaaatccctggcacttttgcagatgagaaaaatgagacagagagtttacacaatttggtcaaggtcaatataccaaattccctgcccctgctagattcccccttgggaatgggcagcctctctcctccttttatttttgtttatttatttgtctttgccagaaatcaaagagtcttcattcactttgtaaaaatcatctgactcatttgaaagaaaaaaagagatgtttttctctgaaaacttatttttgttttattctaaatgagttttcgttctaaacccagtgtgattcctctctattctaagagtgctttcacggcacagtatgacatctctctaatggccagtgttgcctagttgggcttcagtataatggttacagcaaaaccctctgtgctttggagcatagcatcatctctaaattcaggaaagaacagatgctagaaactgtggtcagcgtcactgcctgggccttcagggcgggtgatgcttggaacttctttagaagcagctatttattcaaatgaaatttttgaaaggatctttgatttttgaaatgacaaatctcataccttggctctaggaccaagcaccccatgacttgagagtgctgatgggacttggttgccactgaagggagggtgtgagatggggtgggtgatacctggagcactggcccagtcaagggaaagaatgagagttctaaaaatgagttgtgagggggaaagaggacaagaacacatgtggtgcttaccatttactggcttggatgggggcaaatggattcactggaagcctctttctcgggaaccacaatgactacacagttctacctttctctccataccttcttccagcagaaaagaatggtttttggtctggatgtgtgggaagggtggtaagtattgctctagttcatcatgttgattatgttctgagactctaagggcttggcttagaaagtcaaagcctttgctttgctcctgctggaacctgttttctgtaaggtagtggacactgcaggaacctgtttctgaaaagaaaaggatctggaggatgagaccagaggggacacctcaatactagctcaaaacagaatccccctacattttaagagctcaattagagaaaaacagggtctgtatagtgcagtgttctcaatctgaaccatttccaagaactgcaagagagtgcagtcatctgagctaagcacatggaatgatgaaaaattgcatcctggtgggttttcctcaagtatttggaataaacataaatctcttcttgctattgcaaagcttaatgctttactgaaatgatcatagaatactggattattcagttctgtggggactcagagatgatctgtgctggggagtctccatttgttctttcagacccaccctcccccttttccatactgttctggatccagggaggctggtctccatggatcccatcaatgggctccccgacctctggtttctatttggatttggccaatgggaggcacctgcatcaccacctcttggtggttcccttaaccctgttcacgccctgtaaatagtcccctgcactgaagctccaatttgagtgtatcatctcttttctgctgggaccctgtacaaatacatcatctaattctgtatgtccattttacagatgaggaaactgagtcacagagagggctatggcttttccggttgtgtctctttcctcctcatgttcccagacatggttgagtatttccaacctgagatcctgagtcctagagtgctggatggggattaggagacctctggcactcccatcctctctacttcaatgtgacggctcatgcctaagaaacttctatgtatcaaaaaactgtgtccttaaaaatggtattttaataggacaaaaaagtagttagggagaagagtctctgctgggagtacactgtcattcaccgggctagtggaaggtcagaaagtgtctcttccaccatggtggaggcacctggtgccagggcgtggctagaggcctatgggctgattgacccccacccacctcagcctggtaccctgttaatactgtggttctggatgtgaatacgtaagccaatttatttcacttatacctttatattttccttttttatgggcatcatacaaatccaaaaatgtccaatagagctcttttaatatgtataaaataaaaattttaagtcttagcattgtatcacactataatgtgccatttctttctttataattggtatataaaatagtattgtttctacaatgagtgagtcctgattaatgaaatatggtaggaagcttattaaattatcaatatgaatcaaaagatgaattggaaagctaaggactgaggatagctctattaattcttttgctcaataaatatttattaaacttcttctgtgagaccagtcctggtctaggcattgaggatccagctgtgaaagacacagacatgatctgtgaacttacagggaagacaagaaatactgaatgtatatttgtatatatgatgttacaaaagaaaaaatgcagtgttctttgggagtgttaataaatgagcttaagatggtcaagtgtagcagatgacttgactggaggagcaacacttaagtggagaatggaaggacaagtaggagttagtcaggtggaggtgagtggggaaggaagaaaggtggtcctggccaagggagcagtgtgtatgaacgctgggagctggcaaggggtgaggaggaactgaaggaagtgtgaagtagctggagctcaggcaatggtacagagatgagagatgaggctagaaaagtaggcagatgttaaatgatgaagtgccttagatgtcatggcaaggagtttggcttttatccacagggaagagaaagttgtggaaggggttccaggagaagaatgttatgcttagattttagaatgatcactctgactactgtgcaaaactgaagtgctgtatatcacagtcagatgaagcaagcatggtagtagtcatactcacttgattagtgggattgaagtgggataagcggacaatagcaaatgatacaagggaatcctggagcaagcaataatccccatcactgattgcattctgcagatattatattccgattttagaaacaatcagaaccaatgtagaaccaataataaagaaatagtggcatattaaagtgtgatacaatgctaagacttaaaatttgtattttatgtatattaacagatctataaatacatctattagatgtatttagactttttaattattcttcctagttcctgataagctaagacaatacttttatttttgacagagtgatttcttctgacttgagcctgcagtgtgctgtgagagatctaccactaggtaagtatagaacaagtttttcttaggtttgtaaacaacacttttcttccaagattccctaagacatacataagcctaacattctatgtaatcctcattttagccttatgagtcttatttccatcttatacatgaggaaattgaggcactggcaacttgacatgcacaaaaatgttcatcacagcatacattatgatagtaaaataatacaaaatgaaaaggagagaatataaatatccaacactaggcaaattgtattaaattaattatggtacattcatttgatggaagtagttttaaaatattcattatcaccttaagatgttctcttctattcctagtttgctaaaagtctctattataaatacatgttgaattttattaaatgcttttctatatccactgagatgatcaaatgatttttatgctttcatttgttaattttagtttacattaatggattttctaatgttaagctaccttgcattgctgagataaaaccaacttcgtaatgatgtgttatcttttctatacttagctagatttaatttgctaagttttagtcataaatgagattgactaaaatctttctgcgatattccttgtcaggaatggttttcaaaatactggaattacttgctacttaaatgtatggtggaacttgacagtaaaacagtttgggccagatgttttctttgaggaaagaaattttactaactgatttagtttctgatttatttaggttttctatttcttcttgagtcagttttgttatgtttttagttacatatacgtatttctgttgaatacatatgcaggaggggaatttctggatcataaggcaggcatatgttcagctttagtagatactatcaaacagttttcaaaaatggtgtatcaatttaaaaatttatgccacaatcaggagtgtatgagggttctaattagtccacatattttccaaaacaaggtgttttctgtttttgtttttttagttaagctcttctggtgggtatgtagtaacatcatattgtttaaatttgcatttccttatagactaatgaggtggggcaccatttcatatattaattggccatttgggtatcttattttgtgagaagccccttcaggtcttaaaaatgtgaaaaaattgggttgttttaaaaattaaattgtctttcttattgagttgtaggcatttttaataatatatattttagatatatccttggtaggatgtatgtgttacaaatatcttctctttttctgtggtttacctttttactcttttttatgaacagaagttcattattttatgaatttcatatattattttacctttacatttcaatctataatatgtctggaattgatttcattgtacatggtgtgaagtacaaggtcaaagttaatttttttccacgtgaagatccagttgaccaagcaccattcttttgccatagcactatgtgtctattttggttagggttactgaggtatgattaacacatggtaaaattcattctcttaaaatacatggtttgatgcattttgaaaaatgtatgtaatcattgttttacctcacaatcaagaggtagaatgtatctaacacttgaaagtgtgcacctttatagtaaatctactccctctacctctagcccttgacaaccacaatctggatgtggctctctggtttctcttttttccagaatatataaatggcctcacatactacgtggcctttgtttcagattttttcacttggcgcattttttttgagattcatccatgctgttataagtatcagtggttagttcctttgtattgttgagtagaagaattccattgtgtggtataccacaagtttatccattccccaaatgatgaagatttgggttgtttatagtatttagctactaggaataaagctgctacaaacattcatgaacaggcctttgtgtggacatatgttttcctttctcttgggtaaattactaggagtgggattattgtatcatatggaaagcatagcaagtatatgttaaacactatttttaaaaatcccccaaactgtttccaaaatgactgtgccattttacattccaatcagcaatatatgaaagtttcagttgttccacagctcctctagcacttggtattatcattgtttgtaattttagcaatttgagcgtataacattatctcatcgtagctttaattttcatttccctaatgacattgaacaccttttcatgtcctactttgccatctgcgtatcttctttgataaagtgtctgttcaaatcattcacccatttaaaaattatttgtcttaatgatatgtagctaattagaatatattctggatacaaactctttattaaatatgtgctttgcaaatactttttctcagtctctagtttgtttctttaaaagtcctaaaagtctcattcaaagagtagaaagttttacattttggtgaatttcagtttatcaatttttaaaaatggaagagtactttgttttgttttgttttgttttttgagacggagtcttgctctgtcacccaggctggagtgcagtggtgctatcttggctcactgcaacctccgcctcccagattcaagcaattctcctgcgtcagcctcccgagtagctgggactgcaggtgcccaccaccacacccggctaatttttgcatttttagtggagacagggctggtctcaaacacctgacctcaggtgatccacccaccttggcctcccaaagtgctggtattataggcgtgagccaccgcgctcagcctggaagagtagttttaagtactatttaggaaatctttgctaaaatgaaggatgcaaagattttcttatttttttttttagaaattttaaagctttaagctttatatttagttttatgatccattttgaggtaatttttatgtcttttgtgagataagggtcaagaataactttttatatggatgtctaaatttttgagcatcacatattgaaaaagctactcttttcccattttaattactttgacacctctatctttctctcccctgtttggtactccaattatacgcatattagaccattttatactgtttgacagctcttgcatgatctttttgttaaaaaaattctttctctttcgatttcaatttggataaaatttctattaatctatctttaagtttgtttattttctatagtttctctctctcatctaagatcctttatcttttcttgcattttatcttccttttccatgagagcctttaacatattaatcatggctattttaaagtctctgattgttctcacatccaggccatctctctttccagctctgttgattgctttattttgacaatgaggtgagggtttttttgtttttgtttttgcttttttgagtgtcttgtaattttgattgcatgttggacagtgtttgtagaagagcagtagataataaagtaaataatattgttactcagaattgggtatattttttcttctgtaagattgttgatatgaagggttgagtcaatcttattagtagttaacaagattggtaattagtattgagtttggatggagttgaatttgtgattgccatagttaccttcagtgtaacagactccaaagttctccagtggtggactgcagtgaccttatgcttggcatgccagagggtttttctccatgtctaagctccatcctcagttttcagcaaactcttcatccttgctccacaaaggggacctctttcttcatgtttgtgctcgtctgctagcagtagattgctcttgttcattgtactaggcagagctgtggtagtggtggtgagttctcagttcacctgggctagcctcagtcttaggtaggccttatgtttctgggccttgggagtggggctttgttagtgttcctgcttctcttcaaggcagccaacctttgccttgtatctgtggagtgttttgtgtgggagagagtttcttgcccctcccttactggtaacagacctcttatttgtgtcagcacaggatcctggacctgcaagtttcttgtccttcccttagggcagatggcaggcttttgcttgtacccctttccaagaatcagtggatttttgcttggaccttggggctaggaagatgttttggttctctaccagttgttgaaagcttttgcttaatatgaaatgaagtttgggaggtagatggagtttcttgcctgtgccctactaaaaggagaactccccagtctccagccccacccttcttctttttaatgagtgttcattgcagaaccctgggaacaagcttgagagagagctggggctcatctcatgtttctgaggctcccagggatactgtcatactagcccacacttgccctttagaaattcattaacattttagctgttttcttattcctgctttcatgatggctgcctcttcctactatgccctgccaaaggggacagtttgtgtgacccctttctccttggaagggcatgccactcttggtaaactcagttcacttcgttgccttgtgtccttagctctctaatgagttcaatacaagtattattttgttgattatgaagcttttcttgttgttaggatgagagtgatgttctctgtggttttctgtatcttacatggatgtagaactgtgttgcaactttttaagagtcactggcttaaaggaaaattttggttgtaaatacaattgccagtcaaaaatgaatggaaaccaaatcaaaagaaggcaataaaaccacaatctaaaacttaataggaaaactgagaggactttaattttattcttttcttgggttggctgtgttgggcatttttctttgttcctttgcaggaaatacatggctacaatggcaggaatgttgcaatagaatagctttattctgaggtctggggtaagggggagaggaagattggcttctccctgccataaataccttcaagatagggtgatgagaaagagagaaaaatgaaaaaaaatacaaaaatgagacagtagaatgggcattctggagaagtttgcagcttctcagaagaggagtacacaatgaaagatcttaaagaaggactactgatgtctatgggtcgagaagtacatcattctaattccacaacttattgatttcctagccatctcgggagcatcacctcaactttcagcttgcttatattaaccatgtacacccttggtattcaaagggtggtccaggggccagcagcatctgcacccactgagatcttgttagaaatggagaatcacaggtcccatctcagacctgatgaatcagaatctgcatttgaacaagatccccgagtaattcttgtgtactagaatgtctagaatgcactagatgcagtgttttatgtaatcatggcttctgtgtttttttgcagtcgactttgtatttaatgagattaaaaactttcaaagtcaaaatattgtgaaggtaactctactgtaaggaaaacctggtggggtggggggtatagtgcacagaattaaggcatttaaatgcattttctagttaaattatcaatttagttgaacaattatcattgatatgcttatttaaaacttattacttttcaacttttttttttgagctctgtgctcctagcatttaaaaacattaactctttcttgtagcagggaattttctggtgctttctctcataaagagatttctttttagacctattgctgtgatgggaacatttgtataccccccagaattcatatgttgaaacccaacccccaaagagatggttttaagagggagagcctttgggaggtgattagatcatgaaagtggggccctcatgaatggaattcatgccctaataaaagaaacctatgggaattttgccccttccatcatgtgaggacatagcaggaaggcaccattctataaatcaggaataggaccctcaccagattccgaatctgctggcactttgatctgagacttcccagcctccagaactgtgagcaataaatgttgcttataagccatgcagtctatggtattttattatagcagcccaaatggacagagactcacatgaagcctgcttcctagggcaattctgccctctccatattggtctcagattaagaaacaggttcctgcatgaagttgctattgatgcttcaaaaacctggcccacagggtcatagcaaggacccattcctctgacaagcttcttgccaagagctctcaactttttaatcttcctgactttgagtatcttgttattcagtgaagggagtgtgctgccaaaattctagttttctcaaatcttgataaaggttaattttacatttatccaaattcttaagctgttctctttcctttaattccatagaaaatgctagccgtgatttctggattaaagcacctgctctccttttgtctttccttttgtttttggactcaggtattttaaactcattcctttccccacttagtgagagacatgaagtcaaaacatctggcaacatcattaattttttttttaacatatcttgttcaatttgggaccattacatatgtgttccaagcaggtagccagagaagggcacgaggtcatgcctcccagtggagtcagcccaggtaaagagttgttctggttgccctggccagtgaattccagcacaatctcaatggtcacccttagctgcaaaggaggatgagaaatgtgtctttaagttgggcatattctttctgctaaatccattggggctgggcttgctatggatggagaactaaatgtagacatcagaccaacagggaggtaaagattagcagtaggaccagtgctgctgtattggagaatgagcttaaattatgaacaggttcatctacaatgacatctcctattactttgattgctgagatcttctttcatggaaaagaaaaatatgagctgctgagaccagaaatagagaaaaggggaggtacctagaccaccatgtgcttatacactctcaggccagcaattcaattcactcccttgagggagcatggagggatgtagtgaggtagaagaatcaccttctagtagtttcaagaagataaacgtttttgttttatgtgcctaggtagtaggaatgttgagaaggagagaatgatgcttcctctaatacttatgtatgtatgtgtgtgagggtatatatttgtgtgtgtgtgtgagtgtatgtgtgtatatataaaaatatctgattgttatatattattacatattgtgacaactgtattatattagttgctttatatgtttactcaactcctgctactaatgaccttgcaatgtggtgatctgctatgggagctgagaaaagggaaaattcatgtgtgttttgcagtcctgaagcccttttaaaggagatgggcatgaactgcttatagatcttaaagaatgggtagacttgtttcaggtaaagaggaagggtgactcagggtaaagaaacagcaaggaccacagccactaggccttcagctgtttcagaagctcactgcatgattcatcattagatccctctgcattgcttctcaagaaacaaacaaacaagcaaatgcagatgactgggcagtagctcctgtgattacacatcccgctactccccgcactagaggagtgtttgaggcaggcgctgttggtgtgtagcaggctctggcctctccttacgtccttgtcgtctttgactcctgatgtaatgctgatttggaaactcttagcaattagcccagctccctacccaaggctcagcccgggagttggagttgacagctaattgttgccactgattgctttgctgacagtgctctgtggctattttggtttttcttgagagttccttaattagagaaaatgacatcgtgtgctgtccaatcagttgcttgttggatattattacatttgtaggagaatcaggtgacattcgggcttgttcctgccaagctggtatgaggttgatgacctgcagcacagtttgcttggcagagcagttgtccccacaacagctgagaccagtttgccactgacttaagggaagagcattctgcattcccagtgtggactcaaagtacccaggactccttcggggcaatgtcccattgaaactttacacctcacagtggccattgcctcattagaatgttgactttcttctccctgaaatgagatatttcaggattcctttgatatttgcctttctgacgaacatggaaagacccttttgtttttccatgggagagatacaaataggacctgaagatgaatttccatttggtgaaactttaaatgtggtttctcatatagtatagtaagatctcactacactgctttaactaacaggaaggatgatcttaaattagaaaatattttgagttataagataaatttgaagagttttacaactctgaaatccacagaataatttttacatgctgatttttaggtagcagtcccttctgaggctataatttgaatataattcaattcaataatttgaattattttggaatagcacatacctactttatgtgtttatttacacataaactaggtaggaaagttttatacataagattgtcaaatgagcactgacctttctagttccttatttctgacattaattcattgcatcaaagatttattgagccttcaggggtacccttggtcttaacaaagaagtatgggacacagtttctgtcctcaagaaacttacagcctagctgggaagttaacattctcaagtgagacctcgtgacttcctcgaagggatctttgaggaagatgtagcttttctcctggagttatcagtgttggaacagagagtaaagaatgcaggattgatccagggttgaaaagataagaggagaagaatattgaggatctatggagagttcataacgttctcagattgggcacagaaggaaggagaccaaggtgtatttgtgtctgtgttgggggagtaggggttgaccataaagttggagaaagtggttaatggatatggtggatgggtagaagtcaaagaggactccgtgaggtcaagaaagaaatgaagagtaggtaagtttcaagagagatcaaacaatgtctcttgtccatgtttcctgtgggtctgtctttgcctcctcaactacatgattaaaaaggaaccagacgtgacatttctcttgtgtatccttccctgaagaaattcacagcttattcatgggatatatgaagatcatttggttgaaattatcaactttcttgtacatatatagaaatgattgagttgctcattggttagtgtgtatggtgacctccaaagtgtttcctgatgtaatcttatgtggtataaacacccacaaacacaatgaagaagaggaagtccccatcacctgataattgttcattacttttaagtaaaggaaaattgttatctctagggaaacgtcagagagacccacaggctggaggtgattttgccttaccagtaaagccaaagttgctgttctttcccacaggccgacagctctccttttactcttcctggtttttcaggctaagtgtatttgaaggcccaaatgaacagcttaaacttctttctgatcctgttactgttttcctgctcaacactcaacttattctcatgtttatatttaaccaatgtaatcctcatgaaagacttttatagttgaagtcacagtgaaaactagagaataaaattttaattaaaaaaccaaatttaaaaagctcagactttatgatgtcataattactctatattcttggatattttataattgctgatccctgggcaccacacctgttgggggtagcaactatttggggtcagtggcaagggcagtaaaggaatttaccaagacagttgtaggtaaagaaaggcagatttgttagagaaagtatgcaaatatgttgcaagtatgcaatgggtagcacagcagagaaagggctgtgtgcaaagaggcaagggttggagggaagttttataacatcttgctggagggtgctacgtgtttgtgattagctatttctcagaacagttggtcatttctctccccacagtggggccctccccaacctggggccccttcctcgttgttgcttacttatcttatcaggactccacaacacccactgtaagtccctcgatatagtgtcttctattcatcttggctacccaagtgctccccagtactgggggacacagtggggccttacagttgcctgtgcccctgaagtgaatgtgtctcatgtacagctcgaacataccagcagtgcctactgtaagagcttttttcctgaggtagcattttaaaattccttaagctgtatcccagacatgaaagacttgacctgaatcatgtggttaccatggcatctaaagagagcccttagaagctcatcgatttctccagacagaaagacggtaaactgctccaatagaacattttctaccttgcaggctgagaataaaaagtatatttacctgaaacagcaaatctgatcttcaaaacttctcttaagcataatcttttatgagatatttgctgaaaattgctcactggtttatatgctccagcactgacttgtagcagcttttctttcatctctgacctggaagcttcttttcaaataaaatagaaatatgaaggaccccagctaagaaatctcttccaatttcagagaagggttgaactaccttgagctttcctccttattcagggagacggaaacaaaaacaggtctaccctgaataaaatggcaggtccactttgtgcacaggcaacctctccccttctgacacaggtctttgatgttaatctaattctcattaattgctaactctaaagcaacagagcttaaatctttgaaaggattgctttttatacaatcttattgtctgaaatttgtgcttaatagaaaggtcattggaccaccagctttttgccttagagttggtaggtagggattgtctaagtcattaatttctattgcttgagatttgtataacacttggcagtattcaaaacacttttacatccattgttatttgagccacaatggagtaacaatgccgtgaggcagagagacagatattttttaaaaattacccttctccacttttttattttttgaattagaggattgaaggtataggagagacaaaacttttcctcttcccttttagggcttgtgtgtgtgtgtgtgtgtgtgtgtgtgtgtgtgtgtgtgtgtgtgtgtgtaggggggcgggggtggaggtgggggtggtagctgggcttgggaattcagataaacaggagaaacccaaatctatttaatacaagttttatgtggcctaggggcccttacaaggaaatgaagacccaaagaagcagtaagaatcagttacttctacactgaattggacaaagactagtaaattgtgaaacggtgtcaaggcaaaggggcttggtctggggtagttaattgggtagagaagcaactaggaaaataagggtgagtttatcaaggtttgtttgtacagatttctattggcctcaacttcttttccttgatgttaggaatgttgctttccttctggtataaggaggacatttttttcacctgggagttttatctcctgcttttaagaaacagaaggaaggccagaatgatcttgcatgtcttttttttttttttttttaactgcctttaattcagagtcatcaatatgccagaacagcatattttggagtggcacattcttaattattttagagtttgtgccttttaaaaaaatcagttcttaccagtggcagacctagaactagaacctattcctgtccctaagggttgctcagtcatgatgggccaagtatgagtatgggaacggagagctcatagattgtttgggaattgtctgcttgcttgtctgtctccttgatttgactttcagctccttgaaggtggaggtcctcttatttatttttggatcctcagtgactagaataatggccagcacataataggtgctcgattaacattgctaagaaacaagtaataatgtcaacattttcacctctgcttatcccacctcttacacatgccaaaggcatagaaaatgttgaatggaagaattatatctacaataaataggcaaaaatatgggtatagagggggaagcttaggttgctgatttgccaaaagcactggctaaaggacactgaatggctgtagaaaagcacaaaagaaactgaaaatctagctcctgccttcagggagctcaaagtgtactcagaaacagaacacccaccatgaaaatgatgagtaaagtcactgtcagtctgtttggttggccctgccttcttggaaactcaaagtttgggggagggtgtggacatgcactgcaaaaaaccttaatctcagagggaggaggaagtagaaggactctagtgtcattgtctttgtttggttctataattacctgcacctacatacaagtgtttttatggatgaaaataaattcagcaactggtcgagggatgaatcattctaattaactggaatagaaggtgatccttgacaaagctgcatttggcatttttctttaaatagtcaagtaatcatgctgtagtttagcgtcagcaaacaattgtttccaaccttatccctaccagagctaacattttccaagtcctttagagctgtacttttcaaggttcagtcctcaagccacatgcttatgtatcaactgatgaaattcggattcaggcacctgagaatctgcttcttttccccttagtaaacattttatcttggaataattttatatttacagaaatattgcaaatgttgaaacaaaatgttgcaaatgtagtacaaagagttcctgtatttccttcacccagctttttctaacttcttatagaccaaataatttgtcaaaattaataaataaacattggtatagtaatacgaaccaagctacagactattcagatttcaccaatttttccactactgcccttttttctgtttaatccaggctatcacattacatttagtcctcatatctccttagtctccttggatctgcgatagttttttagtctttccttgaatctgcatttttaataagctctccaggtggttctcagacactagaagtgaacaccattgctctttcaaagccagggcacacctcacaggtgctgataagggacttccctggcctgagcggtgccttgtgctcttcatcccaagtcatgccggtatcactgagggacccagcaggacacataaggcatactctggagagaagttaacaaatgtaacaaagcactatttacagaagtgtagacagaaataaacgaacaaataagggttgttaaggcaaccaggaactatttacagtaaaaagctttgattcactttgggaagcgggaagaggagttggagccacccagcgggagcagtagtaagagatgtgccattggagaaccagcttctgtcagaaccaccagactctgaagtacagaggagtggagggggtcagaccctggacttacctcctctagctcggatcttctactggtgcctcctgttagaggaactcaacaagaagccagagggcagggaatggaccatactgttcccgggcacagagaggggagagaaaggtggagaactgatctagaggctaggtctagggaggagatgaagtgacaataaccagaatttgttttaaagtagaatgcagaagagatagcctggctagttaactgtgcctggattaaaacttgtgctctgtttattaatttatagctactatgttattaggggcccattgcttactttaaaaaaaaaaagagaaccaatgaaaacattacgtttagccttggaaactgtacagcttgtcaacttgttgcaaattcaacaaatatccttttagtgggttaatgatatgaggaaaaaccatagcttccagctaaataagtaaatattcaaactgaagaaaagaagtgccatctgagatacagtcttagaattgatcatggattttgagagcgacatatactaccttgtaaggtttggataaaacagtgcttttttttccattttgttaactctccagttttttttttttattattatactttaagttttagggtacatgtgcacaacgtgcaggttagttacatatatatacatgtgccatgttggtgtgctgcacccattaactcgtcatttacattaggtatatctcctaatgctatccctcccccctgcccccccaccccacaacaggccccagtgtgtgatgttccccttcctgtgtccatgtgttctcattgttcaattcccacctatgagtgagaacatgcggtgtttggtttttttgtccttgcgatagtttgctgagaatgatggtttccagcttcatccatgtccctacaaaggacacgaagtcatcattttttatggaggcatagtattccatggtgtatatgtgccacattttcttaatccagtctatcattgttggacatttgggttagttccaagtctttgctattgtcaatagtgccgcaataaacatacgtgtgcatatgtctttatagcagcatgatttataatcctttgggtatatacccagtaatgggatggttgggtcaaatggtatttctagttctagatccctgaggaatcaccacactgacttccacaatggttgaactagtttacagtcccaccaacagtgtaaaagtcttcctatttctccacatcctctccagcacctgttgtttcctgacttttgaatgatcgccattctaactggtgtgagatagtatctcattgtggttttgatttgcatttctctgatggccagtaatgatgagcattttttcatgtgtcttttggctgcataaatgtcttcttttgagaattgtctgttcatatccttcgcccacttgttgatggggttgtttttttcttgtaaatttgtttgagttcattgtagattctggatattagccctttgtcagatgagtagattgcaaaaattttctcccattttgtaggttgcctgttcactctgatggtaatttctttggctgtgcagaagctctttagtttcattagatcccatttgtcaattttggcttttgctgccattgcttttggtgttttagacatgaagtccttgcccacgactatgtcctgaatggtattgcctaggttttcttctaggatttttatggttttaggtctaacgtttaaatctttaatccatcttgaattgatttttgtataaggtgtaaggaagggatccagtttcagctttctacatatggctagccagttttcccagcaccatttattaaatagggaatcctttccccattgcttgtttttgtcagatttgtcaaagatcagatagttgtagatatgtggcattatttctgagggctctgttctgttccattggtctgtatctctgttttggtaccagtaccatgctgttttggttactgtagccttgtagtatagtttgaagtcaggtagtgtgacacctccagctttgttcttttggcttaggattgacttggcgatgcgggctcttttttggttccatatgaactttaaagtagttttttccaattctgtgaagaaagtcattggtagcttgatggggatggcactgaatctataaattaccttgggcagtatggccattttcacaatattgattcttcctacccatgagcatggaatgttcttccatttgtttgtatcctcttttatttccttgagcagtggtttgtagttcgccttgaagaggtccttcacatcccttgtaagttggattcctaagtattttattctctttgaagcagttgtgaatgggagttcactcatgatttggctctctctttgtctgttgttggtgtataagaatgcttgtgatttttgtacattgattttgtatcctgagactttgctgaagttgcttatcagcttaaggagattttgggctgagacagtggggttttctagatatacaatcatgtcgtctgcaaacagggacaatttgacttcctcttttcctaattgaataccctttatttccttctcctgcctaattgccctggccagaacttccaacactatgttgaataggagtggtgagagagggcatccctgtcttgtgccagttttcaaagggaatgcttccagtttttgcccattcagtatgatattggctgtgcgtttgtcataaatagctcttattattttgagatacgtcccatcaataccgaatttattgagaggttttagcatgaagggttgttgaattttgtcaaaggccttttctgcatctattgagataatcatgtggtttttgtcattggttctgtttatatgctggattgcatttattgatttgcgtatgttgaaccagtcttgcatcccagggatgaagcccacttgatcatggtggataagcttgttgatgtgctgctagattcagtttgccagtattttattgaggatttttgcatcgatgttcatcagggatattggtctaaaattctctttttgttgtgtctctgccaggctttggtatcaggatgatgctggcctcataaaatgagttagggaggattccctctttttctattgattggaatagtttcagaaggaatggtacctgctcctccttgtacctctggtagaattcggctgtgaatccatctggtcctggaatctttttggttgttaagctattaattattgcctcaatttcagagcctgttattggactattcagagattcaacttcttcctggtttagtcttgggagagtgtatatgtcgaggaatttatccatttcttccagattttctagtttatttgcatagaggtgtttatagtattctctgatggtagtttgtatttctgtgggatcggtggtgatatcccctttatcattttttattgcatctgtttgattcttctctcttgtcttctttattagtcttgctagtggtctatcaattttgttgatcttttcaagaaaccagctcctggattcattgattttttgaaggtttttttttgtgtctctgtttccttcagttctgctctgatcttagttacttcttgccttctgctagcttttgaatgtgtttgctcttgcttctctagttcttttaattgtgatgttagggtgtcaattttagatctttcctgctttctcttgtgggcccttagtgctctaaatttccctctacacactgctttgaatgtgtcccagagattctggtatgttgtgtctttgttctcgttggtttcaaagaacatctttatttctgcctttatttcgttatgtacacagtagtcattcaggagcaggttgttcagtttccatgtagttgagcggttttgaatgcgtttcttaatcctgagttctagtttgattgcactgtggtctgagaggcagttggttataatttctgatcttttacatttgctgaggagtgctttacttccaactatgtggtcagttttggaataggtgtggtgtggtgctgaaaaaaatgtatattctgttgatttggggtggagagttctctagatgtctattaggtctgcttggtgcagagccgagttcaattcctggatatccttgttaactttctgtctcattgatctgtctaatgttgacagtggggtgttaaagtctcccattattattgtgtgggagtctaagtctctttctaggtctctaagaacttgctttatgaatctgggtgctcctgtattgggtgcatatatatttaggatagttagctcttcttgttgaattgatccctttaccattatgtaatggccttctttgtctcttttgatctttgttggtttaaattctgttttattagagactaggattgcaacctctgcccttttttgttttccatttgcttggtagatcttcctccatccctttattttgagcctatgtgtgtctttgcatgtgagatgggtttcctgaatacagcacactgatgggtcttgactctttatccaatttgccagtctgtgtcttttaattggagcatttagcccatttacatttaaggttaatattgttatgtgtgaatttgatcctgtcattatgatgttagctggttattttgctcattagttgatgtagtttcttcctagcctctatggtctttacaatttggcatgtttttgcagtggctggtaccagttgttcctttccaggtttagtgcttccctcaggagctcttttaggttaggcctggtggtgacaaaatctctcagcatttgcttgtctgtaaagtattttatttctccttcacttatgaagcttagtttggctggatatgaaattctgggttgaaaattcttttctttaagaatgtcgaatattgacccccactctcttctggcttgtagagtttctgctgagagatcagctgttagtctgatgggcttccctttgtgggtaacccgacctttttctctggctgcccttaacattttttccatcatttcaactttggtgaatctgacaattatgtgtcttggagttgctcttctcgaggagtatctttgtggcattctctgtatttcctgaatttgaatgttggcctgccttgccagattggggaagttctcctggacaatatcctgcagagtgttttccagcttggttccattctccccatcactttcaggtacaccaatcagacgtagatttggtcttttcacatagtcccatatttcttggagactttgttcatttctttttattcttttttctctaaacttctcttctcacttcatttcattcatttgatcttccatcactgataccctttcttccagttgatcgaatcagctactgaggcttgtgcgttcatcacgtagttctcgtgccatggttttcagctccatcaggtcctttaaggacttctctgcattggttattctagttagccattcatctaatcttttttcaaggtttttaacttctttgccatgggttcaaacttcctcctttagctcagagtagtttgatcatctgaagccttcttctctctactcatcaaagtcattctccgtctggctttgttccgttgctggtgaggagctgtattcctttggaggaggagaggcactctgatttttagatttttcagtttttctgctctgtttcttccccatctttgtggttttgtctacctttggtctttgatgatggtgacgtacagatggggttttggtgtggctgtcctttctgtttgttagttttccttctaacagtcaggaccctcagctgcatgtctgttggagtttgccggaggtccactccagaccctgtttgcctgggtatcagcagcagaggctgcagaacagcagatattggtgaacagcaagtgttgttgcctgatcattcctctggaagttttgtctcagaggactacccagctgtgtgaggtgtcagtctgctcctactgggggatgcctcccagttaggctattcggggttcagggacccacttgaggcagtctatccattctcagatctcaagctgtgtgctgggagaaccactactctcttcaaagctgtcagacagggacatttaagtctgcagaggtttctgctgccttttgtttggctatgccccacccccagaagtggagtctacagaggcaggcaggcctccttgagctgcagtgggctctacccagattgagcttcccagctgctttggctgggaatggcgggcacccctcggcaatggcgggtacccctcccccagcctcgctgccatcttgcagtttgatctcagactgctgtgctagcaatgagcacggctccgtgggtgtaggaccctctgagccaggcgcggaatatggtctcctggtgtgctgtttgctaagactgtgagaaaagcgcagtattagggtgggagtgacccgattttccaggtgccatccgtcatccctaggaaagggaactccccaaccccttgcacttcctgggtgaggcaatgcctcgccctgcttcggctcacgctcggtgcgctggacccactgtcctgcacccactgtccgacaatccccagtgagatacacccggtacctcagttggaactgcagaaatcgttcgtcttctgcgtcgctcatgcagggagctgtagactggagctgttcctattctgccatcttggttccacccccaactctccagtttttgaaaggagagatgattaccctttctgcagtatagtgaatcaaactctaggaactaaagaaaaagattcagaaaaatgtttttcgattttttttttgtaattgcaaaggaataagcacttgaatgttattattttatttttagagaataatagcctacttttattttttattaatttttttattttccatacatatagctgcttttattttattgaatttcaataggttttgggggaacaggtggagtttggttacattgataagttctttcgtggtgatttctgagattttggtgcacccatcacccaagcagtgtacactgtacccaaggtgtagtcttttattcctcacctccctaccctttcccccgagtccccaaagtccattgtatcattcttatgcctttgcatcctcatagcttagctcccaattacgcgtgagaacatatgatgtttggttttccattcctgagttacttcacttagaataatggtctccaattccatccaggttgctgtgaatgccattacttcattcttttttatggctgggtagtattccatggtatgtatgtatgcatatatatatataccacaatttctttatcttctcattgattgttgggcatttgggctggttctatatttttgcaattgtgaattgtgctggtataaacatatgtgtgcaagtatctttttcatgtaacgacttctaaagagctcatattattcaagcatccatgggacttatgtggaatcactagtctttagaactggactttcttgggcttttttttttttttttttttttgatggtgagtgtgagtgggtatgattttttccccctcatttcaaaccaggagtagaagttagaaaagaggaatattagctgtaatttgcattttttgccattaagtttgacattaaatacactaagtttgctaaaagagaaggctagtggaagtttgttttactcatgcatatttttcataggtataggtcttttgtgtttgctcatcattcttagccaggaaagggacacctttatctttattttaaaaactggttacactggggtcttggctggaaactgaatctgcctccgagggtttgaatgaagagagtctaatgaagggactactgcagacccctggggaggattatagagataaacagagggtgatctggctcccaaaaactagcagcaggggtaagccatcgccatccttgggccacagaaacaagaggagcaaattgtggagacccatgagggttgtaatcatgatggaagggccactgagcagaagccagagctgtgaagggacatacccattgtgggacactgcagagaagtggagagggtaggagaaacagcaccccattgcactgctcccactccccacctttggctggtgctacccttcatcaaacctaacagaagccaggggtcatggcagtgtagataactttgggacagtgagaggtggagtatggctggaagaattgtggggtggggagagacagggaataccagcaaaatcgcccattgcaattgagccccccaaattattacttgtgacattaggtttgcaggaaatgcaaagcagatgcattaaattaacgagtaaatccatcttttaaaaaagagtcagttttattgttttaaaatgacttgctattcccctagcctgttctgaagttctggtgcataaagaccctgtttgcctgagttttcttagcctcattatggtggtgaaaaaggtgttgatctttaagaatgtggagcctgcatttgacctcaaggggcctggagggatggcacagctgttattggttgccccagctggcattttcagagttaaaaatggctgtcattacctgaatgctcttattgtcctaatgggctatttctgttggagtgaaatgtaattactaaataatcatttccagttgttcgttgattatttgtgcatacattatttaatgaaaatagactcagatgacccagtggtagaaaggcatgtttctgggaaaaacatccactgtagcctctcatacccccagctgtagattattggaaaacaaaagcaaaacaacacgatcttaaatgctcttggcaactttaaccaaacctggtcccaggatcatttaagaacttctgctgcgaggctcagagaaatagagctgaaaatagaccagttgcagcagattcagtggagcgacctgaaaatgttttctttagcagggagtttttagtgagcaacaaaacgccatgccgagaagattacattcttgggaaaagaaatttgtgtttgattttccttttccggtggactacctctctgaagtactttgcatcaagtctttaaacatgatacagtgaaagcttctcagcctcctatctgcagtgatgtttttgtcttatttaacccaaccttttcttcccctattggtgatgggttcttgggcaaagctaccttcatctaaaaggttccaggaaaaaaaaaataaaagcatgctctttaaaaatattatttatgtatttacattgttcattagtttacactgtgtttcctttgttccctagcctggaacaatgtccggcctggctttgtcctcagccatattgcctgctctctttatatcacaaaatgttaagttaaaacgtcaaaaagtggtcaaaagctattctttctagtggctgattggcttaaataaagtttgagagtctttgactctcagagcttaaatgagcttaatggaaattttgagcaaagcttaaaaagccaaatctgtctatcatggcttgtgaaaggaatgtcatgactctgagtagctggaatccataagctgctcatagttactgactctaagtagataccaaggcctatcttgctcttattgatctgacctgtgcaaagtgttcgagcaggcaggtagtagttaatgcaacgccatgctagcttgtgctttaacctaagttaagaacctgaagcccgtgataatggggattagcactgatgtaaagataatctctgtcctttgcagctattcttgtctgtgtcaggattattttccaaatcaccgtggttgtaacattgatgcatctttaactctgctgcctgccatagtccctggaggaccgttagttgccatggttgtctcttctagctctgaaagatacatccttccttttccaccgttagtttcataggcaaggaccttctttctgccctgacttgtcaagatgacctccaacaagtctgcctcctcttgccacagtaggcttcctagacctaggtcatatttatcaggatctgcctctgcttaaaaactctcagccagttgttacctgcagagtaaaacccctgtcagtaaccaaagaagatattgttgtgagcaacagctatgggcaagatccaatgctcggtgctgtaggaacccagatcatgtccacttgcttcttcaccttgtgtccttggttagtttataatttcctgtaggtcaggaattatacttgatgtgtagaagtgcccagcaacaagactggcttttcatcagcattcttgattacatagcttcagttgatgatagctcattaaggcatacagcctggaaacttatatacgtagtcctctcaaggctgttagatgtggctcctaatatttttgaaactgtctatttagaattctcttcaggtctcctgagttatgaaaagagtcttgttactccatccttttgttcaagacaatttactgaatgcctgcttagtaccaggcaccatgccaagcccttggtatgccaaaatgtgtgaaagcccacagaacagactgccaggaacacaccagaggcaaacaaacttagctttattaccttgctgctgcagtaagagagagtcacactgtggagaggtgtggggcatttcaacaggtggaagcttgggaagaatatctatagagtttgcagggcagaagttagttataggatgctcttagaagagattgctcggaattcataaaccaggaagttgctggaacaattggtgctcttatcttgaggacacgtgactctgtggtgttataggtagatcagtttgtctgtggccttatttagaacatatgtgatatagtttggatatatgtctccacccaaatctcatgtttgggaaatgtaagccccagtgttgaaggtggggcctggtgggaggtgtttggatcatgggggtgaatccctcatgaatggctttggccatcctcttggtgatgagtgagctcttgctctgagttcgcaggagatctggttgtataaaagtgtgtggcacctcccctttctcttgctcctgttttcgccatgtgatgtgcctgctacccctttgccttccaccatgactggaagcttcctgaggcctccccagaagcatatgccactgtgcttcctatacagcctgcagaaccgtgagccaattaaatctcttttcttataaattacccaggctcaggtatttctttatatcagtgcaagaatggctgaataaaatatgtgtctgaatgagcaggtatagagtccgggtttagtttgttttgcatgtcatggcttatacaggttttcaatgttgtgaataataatctaattttgcaagttatggttttggtttgaattttcagatccttctcgcatcttagttgccagctgaattggctttcccttcatcagaaggataatgacagagttcctgttctcaagaagtccccagtctgggctattgtaatataatttgatgtgtaccataatagagataataaataagctgttactgagttcagaagaagcaaactttttaaaaaaactataactttgttgaaatcctaccatatacaaggctctacacaattaggcactgctcaagtgccatacattgtttgatcctcagcaatcctacaaagtagctgttatttttctttcaaattttaaagacaaaaaagtgagatgcaaaaaaagttagatgggccactcaaggtcacccagctaagagatggttttaggactttattaaacaaatacttgctgggtattgttctaggtgctttatataagctccaaagtagacctctgaagtagctactactctattctatttcatcattgagagtaatgagccttggggatatgaaggaactggtctaaaggcacaaggctcatgaccatgtagtagaggcaggattcagaccccagccatgtggctctccgggccatgcacatggcaaccttgccctgctgcttctcctcagcccttgtcattggactttcatgtctgtgtctttaaccactgtgctagtgtggctcacagacaggagaagcttcacagaagggttgacctgtgggctggggtttactagataaataggatatctctggatggatcaggaagagaaggctgtgacacttcattcaggaacagtagccctcaaggagccctgggaacagggaaaaactctgctgggccaggggtggggtgaggcttgagtgtgtagaatcagagagctgtgggtggcagtgatagagctggagacactatcactagagtaatagtgttggaaccagattgggacttcacagtcgccccttgcatttgaccaacaggatgcttctcttcccaatacctcccttggctctgaatggtcactcttgtctcaattcatcccctaaggagagagatcaccaaagttatacatactgaaggcagttccagagaagaagttctagaaatgtgttaagtaaaagaagcttcaggaaaaaatgctgcctaaagatattcttatggcaattgctttggtgaacataacacttattttaatgtctacctcctcataagttagagaaagaaaatgtcactacttttcatcagtccagagtctggaagagcagcttttatttatgcagtgctgggaggtgacttgcatttaatcttcacatcaattctataaggaagatgctattcatatctcagttgtatagatgaagaaactgaggctcagaggactccaaggagtttagcacgtcgcacagtgataggtggtaaagtcaagatttcaacctggtttgatttcagagtttgttctgccacattgcttcaagaagtctatgtccttttagcttgtgaaagtgcagtatgtcccaaacacaatggagagtcagtagcaggagaggcaggagcagcctggagtagtagggagaggcagtagtaggaggaccaagaggagggaacttgttggagcttcacctacccttccccattctgtgccagacctgcccctgcttcccatccttgggacttcctggtgtaaaatagtttcccacccagtgttactccttagacagcaagagttagtccaaaagccaaagactgaaactccaggtcctactgtgggcagtggagctcctcttccctttgctgggacattggttcaacagccaattagcagatgtatttgtgttgacccttctgttaccaacctagtagtttacttatttaactaatgacaggtgcccttgttaggcgctgtgggcacagcaaggtctttgatgactctggaaaactgatgatatttgtaatttggggtacggcattctaaatttatgtagcaccagggaaaaagtggcggcagtaggtaatgagcccagggctacacattctggaaatagaaggaatggtttgttaccatctttttttttttttcctgtagagtgagcttgtggattaattattttagtttgttaacttactctaagtagggcttgtccctttgaccctttgcatgcccctgccatccgtggtatctagtatggctaataagcatgagaccaccagtttctgaatcctggttcctcggcttatcttggacgagctatttaaactttttgtgccttactttttttattttgaagatggaaataagagtttctactttatagggttgttcgaaagattaagtaaaaaaaaatcctggaaaatcactcagcacattgctcagcacatagtaagagctcagtaaaggataagaatagtaaatgttgagtgagcacctgttgtgtgccaggcctgggcatgggctgaacactgcacagctcccaggggtgcctttcacatggacaacgatgtgaatgtgactctggagttgtgcaatgcaatgaccccattccagaaactgctgtgagtgcttcacatgtgttcgctctttcagccttacaacaacccattattattcccgtttataattgggacagagagatgttaatggctttgctcaagtttagccagctggtaagtggcaaagctggggtgtgagccattcatattattgtggtgtggaccagcacagttgacctctttcctgtcagacacaaaatggaggaaagatctcctcaatagtttgattttctttattaacccataatgcatggcttgtctttgtgtattttaatatttcttagaagcatttatatttttagccttaaataatacatataattacagtttaataatagaaattcataaattcacttgaccttgggaaaaggttatatactgttacttatcaagttcaactatatgtgattagggcagaagaaaggaaagaggaaatgggggctggggagagagagaatgaaaacaagcccaccggacatttgagtagtaccagcacatctatccacccatccatctggcttcagggaaggatatgtcagcagcccatgttctttgctcagatggcgtcagttcccatgcgactttcataatgcaggcatcttgccacatggagtgtagtaatgcacttttcatacaacatagcctataaatgaagccagatactttagctgctgctcaaccagagaagcaggggtttgctccaatatcagaagaaaaaactagctgtgctggaattgttgacaagtgacatggcaagtccccagtgagacacctttctgagggattttcaagaggaccatcctcttcaaaagaccattttttgctctgcgtggtggtcagtggttttctgaaatggttctgggtcctccatggcacctgccttggccacagacgatctaggaaaagcaccaacagatttgttccattcttctattttctactactgtcaacctgagtccttccttgacctagccagccccttttgcacaggatggttcgctgagctgtattgctctctcttttcagggtcttgtattgccttcctctattggcaccagaaacctctgacccccagcccttcccgaactttcttgccttttacttgcctgggaggagaactcagacacatgaattggtactatttatgtctcaggtaactttttgtaaccttctgaatccttcaaaattagttttcttcctccccaaatttcattcaggaggccaaaataagaaagtttttcattttaaggttaaagtctctgtgatagtgagattacaatagagacagatcaataatgactccttttccctcaaattctcatcctgcttgctgctctaagggtagcagcctcataggaacaggtagcattggtggcgtttccatgagaggttaggggcacctgatgattgatagcaattatgacaaggctgtatagtttctctgattgccacactgaggtgactcagggcaccatcagaattggaggagatgaattttttatataaaaataggatgttgtcgatacaatgcagtcaaaaaatgagtcaccatgccctctacaccctaacaaagtatgccttcgtttctgcttaagacccaaataaattactttctgcaactgccattcacagaaccaaattagagcctagctaagatggagcagaatatttttgtctgggacaaagcaaatcaaaatggcaagattaccagttagtacaagggcctagccacagtgggcattcaggttttagttcgtctgctgtgtgctcaggggatttttgttctgcaagttacttttatgatatctactaatagataggtggttggcagggggctatatttaggagaatattgcttgccctaatgctgtgggagcctgagagaatgtggttgtattagtccatttttatgctgctgataaagatataccttagactgggcaatttacaaaagaagtagctttaatggactcacagttccatgtggcatggaggcctcacaatcgtggcagaaggtgaaagacacctctcacctggaggcagacaagagaagaaaacttgtgcaggaaactcccctttataaaaccatcagatgtcatgaaacttattcactatccagagaacagcaagggaaagacacacccccatgattcaattacctcctaccgggtccccccgacaacacatgagaattgtgggagctacaattcaagatgagatttgggtggggacactggccaaaccatatcagtggcttagaaacatgaatacagaacctgaattgagcctatttcttcattttcccacctgattgctttgaattaatcaggacttcagtggaatgctatctccctccctggcttcctcaaagctgggttcattgtacctcctaggtcttgcccataatttctctctcaaggctatcatcacgttttgtaagaattacctgttctgtgcactttttacaggttgagactgtgacataattagtagcaaaaacagtgtctggcatataattggtgattccttgtggaatgaatgagtgaatgaatgaatggtgttaagatgttatgtttctccttttttcagcaagtttcttaaataaaaaaccaggacgaattctaccaggggatgtggcaagatcatgcaggctctcaataaaagcactatctaagcatcctacttactgacccaggcatgctgggacttttatttaaagaaatgtgatgtgaaaggctgtgttaaccccctaaacccaattgtcagagaatctgaaattgtaaaagcttcaaaacctgaaaatgaatgcaaattctttttcttatcatttctgtactataaccaggagaacgagagggcctaggaccagatctctttaaagtgaggtgggcacttacagataccacagctctaatcagatgagggttagtccataagtcacttattccaaggaaactaaaggagttttgaaagccaggagaagcaagtgagtcagcagaacaacatcagcaaacagggctatagtccgtcaatctaagaacatgatatttcctgtctcctttaaactgcatatggacagctccaggattagagtcagtgttctgggtttttataattgaatgttatatcacaaaattgttttccaagttgccacattataattttaaacaaagtcatagcatcctattaaatcaatcttctctaatttggttggttggttatttccaatttttttaaactataataagtaatgttgccatgagcatctttttatgtataaagtttctttattcctttaggatgaattagtagtgcattaagggtgagaaacaattttgtggctctggatacacattgccagaatatttttcaaagggctgtagtgaatacatccagggcctattttagctccttttgaaaactgtgtgctctgctcactgacattcactgctttgtgatcacctgtacttgttataaatctgaaactgtatacttcacattgctccctctttatcacttgccacacagcccacacaaaagccaggttcccacgaggttcagtcccagtagagcaccaaattcaaaattaattagaaatatttaattttgatctttattgtttctctcaaagaaatctaatggacattcttaaaactccagtcctctccttttcaatcctgactcaggctgcacttgctagacgcctctccatctctctttccattgctatctcacctctcactggcttctctgttttttttttttttttttttttctgctggcacctgctgtctagctcatttatccagccatcttccccaaggcccatgcaacccacagggctcttcttgctgtacagaacctctctggggaaatagagtctaaatgtcctctaggggattttctctctcagactcagacttcatataacaagggaaaaaccctgaagctgacttggtaagcaagaatataccttcattagaagcagacaaggataggggaagaccatggatagtcacatattaataattttgtccctaccacagataacgacaacagcaataataacaacagcacttatatgtttagtcaggccaggcactgttctaagcacttgacgtgtattgtcactgagtcttcataacaaccttttgaattaactaatatgatcaactccatgttttagttgaagaaactgaactagataatgtttcaagtaagtttctcgatgtcatacagtaagtgacagagctgggatattcactaggtgatctggctctaaagtctgggttcttaactgccctactctactgcttcagcctgtgtaaatacatacacacacatacatgcacgcatacatgcatatgttaatctgttgtatattacgtatataacacttttcagattttccatatgttgtcaaaatgtagagcaagaacttgaaaacactatggagtacccatttcttaggagttacttttttttttcttttcttttctttttttttttctttttttttttttgagacggagtctcgctgtttcgcccaggccggaccgcagtggcgcgatctcggctcaccgcaagctccgcctcccggattcccgccattctcctgcctcagcctcccgagtagctgggactacaggcgcccgccactacgcccggctaatttttttgtgtttttagtagagacggggtttcaccgtgttagccaagatggtctcgatctcctgacctcgtgatccgcccgcctcggcctccgaaagtgctgggattacaggcatgagccaccgcgcccggccatgagttgcttcttttaattaaaaattccttttccaggtgagtttgtgctactgtgtcagtctgtgtgtcagatcttgttgatctaggttatgctgttactttattacttctcgtgatggaaaaggcgtgttttgacaaggtcggtggaaagatgtaatacatcttggactctggaatatccatctagtaaaatggatgtgcagtatactgacaggggtggtgctgaggctctgaaggaaaggagtttgtaatttaagttgcttttaacaatttctcaagtaaatgtacacatcctgcctctgtcttggatttgtttttcatgcattggcttttatcacttatatttttcttttggatatgccaattaggtggcccagttcattgttttccgcccagagacgtgcacgatgcagtgctcaaatcagatatcccttctccttcggaaaaaatggttggatattacatacatggacacacctttctcagtcagaggacaaaagtaggaagtttttgattttgttcaagaagaaaatgtctggcaatttaggtcactcttcacaggaaaaattggctttaaaaacattaatcaaacgtgcactttgaaacactgctgctagtctgcccttcaaagaggagtgcatgttgagaaaaggcaatagtcgccccgttttctgtagtggaaagaatgttggaataggagtgaggagatctgaggttgaggccatttctgctgatttggggggcttatcacttatcctctgagttttactgtcttcatctgtgacatgaaggtttgcactaaatactgtctatacctttcttcatacataataaatttaagataaaccctctgtgtaggtggcctttaagatcccatctgtcctatgcaggtgtgattccggggacccccagcatatctagcagggcatcagcagcacctccctgctggagagtcttcgctcccctcacattcttatcaaccccagctggctggctcaagctcaaaattacctaattagcaattctttccttaagattaagcactgggtgagacaaaaatattcctggaagaatccttgttagccatttgctataattatttagttctattaactaatctaataagcattaattcagtatataagctattaaagatactgagttgggctctgggtgtgtgtggagttgggtgaggaggagtgcaaagatgcaagagagatggccctgcccttgatgctggagaatgggcaaagctgcatagagtcagatgacagctgcaagtgttgagtgctgtacgagtttaaatggagagcgggattgctggcagctgcggtgggcagggattttctcctttttaaaattgagatcaggtttgaacatgactttgcaagatggctgactgaacaaaagacacaggtaagagtctatggcttgacgtgaatcagagcttataggtgggaatagccaaggcatgttcagaaccagttcaaggcgaagccatagtaccataaaagatggataaagaatatcagaatgttgtgggctgggcgcggtggctcacgcctgtaatcccagcactttgggaggctgaggcaggcagattacctgagctcaggaattcgagaccagcctggccaacatggtgaaaccccatctctactaaaaatacaaaaattagccaggcatggtggcacctgcctgtaatcccagctactcaggaggctgaggcaggagaatcgcttgaacctgggaggcggaggttgcagtgagccaagatcgcgccactgcctgggcgacagagtgatactctgtctcaaaaaaatagaaaaaagaaaaggaaaggaaaaaagaaagaaagaaaactggattgagttcagtaaacaaaaaggaatgatcatttatttttgaacaagcgagtgatataccaatggcaatttgaggaattttgtgtggcgggagtgtgcaagatagttttgagaggaaagagtccctaaggcttccaagttccaacccttactccttgaatgttattaaatgcgtattttaaaaatttgatctgaagatccttttgggaagaaatgttgagtataaatagtctttccagccaatataagcagcttgggaagaaaaacgaaatgtttgagggatcctaacgtgaagggacagggcttggaatgcccgctggttttctggtcccagcaacattaatgttcatcctctttcttcctttaatttttctagcccttaaaacagagtaaaatgtcaaactgtgaaagaccacaactgcttttctttgttatatttagcctttcacagtttttaaaaatataaaagctatagaatctgcctcatctctcatttctccatcctctcactggctgaggacatatttaacaggtttcatattggaattaccaggaaagtttgggctgtctatggctgcattacaaatcacccttgagtctaggggcttaacacaacaatcacttccatacctcacaaatctctaatctgagctggtccaggtgggagggctcaggtctgttctgcataccatcagctggggtgggtcgagtggaggctggggggtccaccttcaagacggctcactcacatgactggcagctgggagcttgggctgggggtgggtcatcagaagacccggggtgaggggagccctgtcttctgtccacgtgcacccctccatggcttgttggcttccacgcagcatggcggcggagttccaaaggtgaacatcaggggttgtaatatgctttatgtgagtaacttgggttgtgctttgaaaattttcaccctttgattaagggataagggtaggcccttaagctacatagttctttaaaatccatgtccctgactctggtgtcctctgtcacaggctacttaaagggctggtgtccatgggaggtattccagctcccaaagtgtgtggggtgcctaagttctcagcagagatgggaagttgagtcacagtgatgtgaactgaggtgatggtgggtaccccctgggtagagttgtcttggagaagcacagaatcaatcattaaataccattctctgtgacttaaaagtcaagtgctgggttttcaccactcccttgatcttgctcaaaaggaaacttaatcaagagaatgttgctgtactccgcttgcttcaaatgggttctgcgtggctaaggttacatttggtagctcttggcttgtcttcagtttcaaatgtagggtgagagaggatgttgtttggagagtcctctaagccctctctgctgatggaaagaacgtgtttcagtgcttattggcctcctaagtttctgagagttgtttttgagtcatttagaaataattaaactgggttaagcaaatgctttttgcttcagagcttcaacatttattagtcagttgtcctgtagagcaggtttttgcccttattcttcaaagctcaggccatttattctataagtgatgctatctgatgtcacaatgatatatattgttatactggtatttatcaagactatgtaatgaaaccctatgttggaagaagtctatgtctatacaattagtcttgaaagcaggagctctttccattggatgcagtacctggaattgtggtatataatattttaattgaatacaggatgtttttggcattaaaatctttaggaaggttaaagagttagaaacagagaactgtccaagtaataaggagtgagccatttttataaacatcctgttccttaggtgctcatggtttgtggaaacctcaggtggagacatttctgaagattgctagactgaaaataatgtcacagggtccaggcaggaaacatagcatattcgagcaggtgattcaggagagacctatttacaaaagtgtcagcatggttaaaagaaactaacaaaggatgacgaaagcaccctgggaagccactgtaatccctaagcctggaggggactgggtagggcaccaaactcagatgtgggaggtgccactggacatggggctgtgcctttcacagaggagcacatccacccaccaggaagatggtgggaagagtaaacccatcagttcctcttctttctgatcacctgccaaggagttccattggcaaacctcaaccaaagcccagaaaggccagaaggcccattgctacgttccataaaattcagccttctggggtacagagcagtgtggagaagggtagggagtggatttgaaggagccagcggaaagtatccatcacaacacatacacacaaccctacagtttcggttagttaatgtttgtttcacaaagacaagctcatcatggaggcctaagttgcatgggtgaatttaacataagtttctctctactaagaaaagggtgaaaattcagattgcataaaattcatcccaaaatatcattagctctgggacaaagagaatttgaaacttcatatttctggcttgcttcaggccatggcatagggacggagtcctggggttagggaacaggggagggctaaggtatttagaaataacctttcctaaagaaaaggaaatcttagttctgtaacagaaaataagccctcggcagagcccctgagatgagccaggggtggggaagaagagaaaacatgcccatcaattaggtgacagcagccctcactacctggtagcagagggacagaaccccaaaggtagatgaacttctgtgataaatgtgctcaaaagggaggacagttctgagactcattcagcctgtatctcagaagcatatgtatctggtagaatgtagccgcttgggggtctagtcacactgtggcttatttcttctttaaaaatggaattgtttagactctgcatactcagtgggtttaggctgccttttggtgctgaagctgcccaagatggaagggaagagcatgtgtctgctaaacccttcacagtttccagtgtatgctaatttattcaaggtcacagaacatatgttacatgacaatggtataaggatttttttttttttttttgagatggggtctcgctctgtcgcccaggctggagtgcagtggtgtgatcacggctcactacagcctctgcctcccgggttcaagcaattctcctgcctcagtctcccaagtagctgggactacaggcgtgtgccaccacacccagctaatttttttgtatttttggtggagacggagtttcaccatgttagccaggatcgtctcgatctcctgacctcctgatccaccagcctcggcctctcaaagtgctgggattacaggcatgagccaccatgcccagctatggaattttttatgtatgagaaatcataggaattttcaaggctataccctttttttatgagaagcctaacttcttgcacagtggctttcaacatacaaggtaggttcatagtattttatagtttatagttagtttatagttataaagtgctttgtaaactgtaaaacttatagtttatagttacttcccattcagtctgccttaattcctaatatccaaaaggagttggtatatgacaagctcatggcacctgcttaaaagcagtgtcttaagctagtttcaatttctttggcttagaatgtgtgttagtctgtttttgtgttgctataagggaatacctgagactgggtaatttataaagaaaagaggtttatttgactcacatttctgaagggtgtacaagcatggcaccagcatctgcttggcttctgatgaggcctcaggaagcttacaatgatggtggacggtacagggggagcaagcacatcatatgatgagagtgggagcaagaaagagacagaggaggtgccacactttttccaacaatcagatctcacgtgaactcagcgggagaactcactcattatcacaaggagggaaccaagccattcatagggatccatccccatgacccaaacaccacccagaagaccccacttccaacattgacatttcagcatgagattggtaggggacaaaacgttcatatcagaatgaatctggctccttctcccaaaataaggacgtgaactaccctttgagacttggaattcatatacactgaagactgtttagaaaaagaaatgttcacataaataggttatagttccttaaaaagccaggttcagcagatgtagccataaaaagattcacaggagctgagaagttccttatggccatttaatttgaaggtcactttaatttgtcattggtcttgaattcaaatattcacaaaagtaacctttgggcaggagaataaatcagtactgttaattgcacttgtttaattcagccatgagaaaaattaatcctttcataagcagctggttttctggatgacattctgctgctgaaccattccttttattttgtgatggaaagaaaggttataaaatgtttttaattaaaagttttaatcttttttccccttctctaaaaatacattgtggaagaatactattttaattggaagaaatatttaactcaataaaactaaaatataactggctataatcaggaaatgaaataatcaagataggacatctgaaggaacccacaaggtttcttgtaggtatgcatacaagaaatttatactgagacctgtagtttttcagaataggcactaaggaaacctggtaataaaccaacgggttggccatttgctatgtgcaaagctagtttgagaaatataagaggaggttattgccttcaaggagctaatctgattgcagagataaaacccatgaaaagtgattgatatacaagaattaaatgactgtttaattgaaataatgccacaaaactgtacttatcttccagataattggtactggtaataagtgctttatttggaaaagagagagatggttgtggaaaagcatgcagcaagttggagatggaacttgaattgggtttttaaggaggagtaggacttggatagacttagaagggccttagggatgacagaagaaaagcaataaataatagggcttaaaatggcctgggatcttcatggctatgcaatctggatggtacatgaataccgccagtgactcactgctttcatgggtaacctgctctatttttgcacagcattagtcatcagaaagtacttttgtttagtcttcaggtgaaatctatccctgcccccttgagcttctatttgaattctttccttgtagagaaatgtaaaaccgtcttccaaagatgagcccttgaaatacgtgaaaaggattattttgtgtcccctaagttttcttttcttccccagtccttttggctattcctcatttttcactgtttccagatactttgccttcttgttcagttttctctatgtatcctgagacccttcgccaatagtctttctcttgcgaagcgtgggtctgatcctagcccttttaaaaacctgcagcccctctgcagtgcccacagaataaatccggcctccttgcttaactgtgacatagttcttctttgggggctaaaaaaggtttgcactgtgcatgcctcccccttcagtaaaacgccgcctgtgccagaagacatggcataactgtgacacagcatctaatgtgcgccccacctccacttttccttgttgagtgggcagggagaagatggggagtggggttttggggttgtatattttcccctttggtgagagagcaaggccattgtctgagtgctgtaggcactacttttgttgtcctggccactgtacatggcttccagggatgccaaggctgatgtggaatcaaccagtgccccctgcccccacccccattttggccttggctcagcactgtgtttttgcccctcagagctgccaagccttcacaggaccaccaccaccctatcctcctgtgagtgagctcatgaggcccctcaggccctgatgtaacacaaggactatcctggctgagtttctgattttcacctttccttgaagctaacagggtctctggggcatctagactggctgggaaagtcggttagttgccagaatgaccgaggcttgcagaatccatccttaacactgtcgatagggatttcttcacttttttctatttgttgctcttgctctgttttataatgatttgagctgttacagtctaactcaatcacacttctttcagcattctgaaaggaaaactatgtctataaattccaggaagaagaagagattgtagcttttggctttactgagaaaactcagaatgacttcttgtttttcttctgtgttattttaaagtgagtagcatggtttctctgcagatgcctcttcccatcctgagatttctcatggttacttgttgatttgctgtaagctccaagagtgctataggactctatttttattctctgcatagcacttatttcctgatatttctcatgcatatttgccgatttgttgtaagctgcctaagagtaggaacgttgtctttgttcattactctgtccccagcatccagtgtggtagacatgcaatgaacagtgtaatgaatgataagtcattcttggtgtagaatgcattcttcgccatactttgagggctggccttatgagccttgttaggttttagcaaaaagaaatttctccagaatgcctgctacctgaaagatgccctcctgattacttactagtctttggggttgctcccagtgtccccctgccagtggtcatctgcccagccccactcttggaatcttctggaatgaaaatctgccttctgcttctctggggtttggctctctgagcatttcttgcctgtttgtatgtgggctgatctgattgatctgagtagtctaccatttgattaatagtttgctccccatcttgttcattactctgaactactgaaaaactgcttccttgtttcttaaagggccatagcattcagatccaggaattgagcttcagacagttatgtattgctatctgctttttacccaacactgatttttatcaaacactgttttcctttggagagcttgcctgccttcctttcttcgtttcttgctttcttcctccctctcctcagcacacatttgttgatctcctactttgtgccaagcccttgtgctaagtgatgaggatccatggtgaataagacaagcagtctgcctgccccctcatgcatgttagaggctactataaaaacagtgtcctcaccaccaccaccaccaccacctgcacacattatgcatgcttcagttgaagggttgagttccattttgacaaatatcatcatggtgtagagactgggctgtagaatcaggcagatctgggctgacctcccaggtcttccatttattacccaggtaacttactttcttagtgcttcagtttcctcagttgtataatgtggagaataatagtcttcaccttgcagaattcataggaagataaaatgaaatacaatttatgtaaagcacttaggacaggatctgacccttaatccgtgtcagtaatgagagtgaggatggtgataatctctgggagcctggatgaaggatgtggaaatagttcgaccttgattatgatacaagtgctcttaattgccatttgcttaactaaaggataaaaggttctgtttaaattagcaaaggggaaaaaagaggtaaacatagttgggatacataagtacagtaatcatatttttttaacttgaaaaatcagcctgcgtagtgtgactgacaagcaggcatatgcacttctcgggggtgggcacaatatttatattcgggtcactggttgctgtatggacgaggcacatctaccttaaaaaagaagctgctgagaggggacaaggggcttgttggggagggggcactgagggcggagagaaggaagaggagaggagacaaagcccctgggcttgctcatttcctgctctatgtaccgtgacttacctagagttctttcagcctttaaataattgaagaccatcttaagtatcagggccttcatgaaagtaagtaatatgcccagtggcctgtctgagctaggataaaaatctaaacactctgaaaggatcgctgtgtgtgtcataaaggaggaatttgtcaacaaaatggaagggcagatacctgtctgtgctggtgccagagtctggttgagagctgtctaaggattgcagcccccagaaatgctcagggcagagtgggtgcacctggaaggacggatggtggagttgtccttgagtgttcacaactgtgtggcctttaatgggatgtctgcttgaaacagagtaagagcaggaagtgtctaaggggccaagccccatgttaataacaagtttgctgcttgaacattcagctaatttgaaaattagttcatttttaaatgccttttagcaatttgagtacttagaaaatttcttcggggaacttaacaacaaaaattcccacaaaaatgtcctaagggatggaaaaaaatctcccaattctcttagaatacttttaacttttcagcagaggtatccaaacatagagtgtgaatgttgaataaatatagtttaggacaaaaatagaaaatggagacttgttctcctagtgcgaaaacacatgtaataaccacaatatttttcttttttttttcactgtaaaaaaaaattctgggtaatgcttcatgctgggcaaatggttatttctcctttccatcttttcattacctgctgagagagaggtaatgaaaagatggaaaggagaaataaccatttttctttgccaaagaactcacatttttaatgtctttgtttctctttaaatttaaatttatatcaggagaagattcagaaaagatcatggtgagatgaagtatctccacgtaagcctgctatttcctaggcatggtcaggggccctccctaacttcctggcactgtccctggcccccacttcctctttcctcactcctgcccctttgccttggatgctctcatagtgtctgtgtttctccttcatagcacttaccacagtagtaatttaagaataaactttgtgattcatttttaagtatttcccttctttgctagactgtaatgtccatgagggcaggggggtagactgtgcacctgggtatacactgggtctgaccaagtgcctgacacatagtaggagcttagtttatattgttgaataatagataatgtttattcaatgacaggcattctcctaatgaaagaatcagcctttaaaatacttggcaaaccataaaaaaagcttcaaataaaatctaaaagaatctatgtgtacaatttattttgtatattcctttgggtatttaagctattgcatacatcaaatgctacaactagcctggatatgaacattggagtttccaaaagtgtaaattgaggtcaaataaattattttatcttttcatccctgtgtgagtgagggaaggggagggaagttttgctaaattgaagttagcacagggagagtaggtcgttattagtcggggggtccccaatcccaggtccctcaggagaacattcaaagagacattgcttgtgtaccagccaaggtcacaacaggaggtggcaggcactctcaaatgggtaatttgaggagaatttaacaaaggggtgacttgtgaaagtgagggcagggtttatagaaatcatttagagatagtgcagcacccagggctagctacagctgagagcctttactccctctagtcctgaagggtaaggcctggagagttaccagaacccacagagaagagctgtaaagagttggccacttaaaaggagctgtgaaaatggtaatggagtatagcgaacccacggcatcttggcgggaggaagctgggggagtgcatacttttcttccacctcccaatctcctgccaatgccttctatgagtacaacccaaccagcagtcaagacataagggaaccattgctttggtccataagggtcaattgtacaaggcccagagcagggtagaataggttggagagtgaaggtgaaatacaaagagaagatataaggtaaaaaagaagatagaaaacacagcttgcatactctccacagaagcccaccagaggaacagaaagcctggaaagtgtgaaaatcccatattaaaataaggacatttatgtgagagctttggaaggtgaacctctgcactgtcccaaggaggagaagtgatattgccaatgtaagttgctgctcacttgcagcagctaaccttaaatcgtagaggtctcacaaattcagtcacctgaacaaatgctagtagttgcaagcaccttggtgtgttggacacaggagccttacaagggttatttttggtgcctccattttccaatagagcaaggccgtttctgtaggcttttcttaagtacagtgacactcacagtgaggccccagcagtagcacctgggagctgattagacatgcaaatccatgaccacaccccaaccttctaaatcagcatctccgggggtggggcttagagagccatagttcaacagctctccaggtgattcctatacacactgaagtttgagaagcactgcctttgcagctatggcaaacttctggaacacgaagaaataaagctgtgagtaaaacacccctcactgcaccagtacacacaattttttcttactcttggcatattttcaaatagtcctgtaaaataaggagattggattagagaagtggttttcaaacagagtttatttgatccccttagagccaaaggggtcactgggccaattcacccaaccaatgtaatgtttatctttataatatttcatttgtacataaggttctaagacttaagaagcattgaaaaacctctggttgagatgacctaaggttctgtcttgctcaaatgttctatggtgttttgtatatgtgtcaattgcgttgattcagtatatgtagtatctgtatttagtgcttacatagatggggcatattttgtttcatttcaaaatattagtactggcttatgcccagaggtgctatttttccatttcctgtcctttctggcataactaaggtgttttcccatagatctttctaccctgaatgtatgtataatttctagaatagcagttaccccttgtcggcatgttgttagttattttagtatcttttattgctgttttgaacacacacaaaaattgcagaaagtttcattgtatgtttgcttgtatcagcttatgtgtcagagctagtcatgtaagcatttaggctattatatattttttaagggagcggcttcagcaggcaggatccaagttgttctgatccctgttgtgtacttggcttacatgacatcccacatgcttgagcaagtgcctgtcctttctgtgcttgtattttcttgtcaaagggccatgataatatactgcctccctatgtcacatggggtggctccagaatttccacatagaagggggtttggggcagtaatcttttagctggggatagagaatgggacagggacttttcatgaaggtaaatttgcaaaggaaacacacagcttttcttagtttatatatcaaagatcataaaatttaaaaagtcttccaaatatgcttttatttatattaggttggtgcaaaagtaattgcgggttttgccattactttcaatgaaatgaaaattgataaaatgggaaattggtaaagtggaaattaattatatcaaggaatacttttaaataaaatttggactggctttgggggaggattattgagggcagggagagctaaagttcttgcccctggccacttgttaacatagctcttgtgtgaccctgggatcttgtgaagataataaactgatgaaagaatggaacaagtgcaagactagaaggattatcaggctggtagcgtttatatttccttaagggtctttagagaaggaaaagcatttgattcatctttatgtctttccccagctctcagcacctggtacagtgcgtgactcatagtagctgttcaataaatacgtgaagtgcagaagaatttgtaactcagatgttacctggggttgcctgattctttgatatataaaaaggacttgaactctatcctaggtgctctgcaacgttagaagcttgtggtctcatggtccactcttgctctgatttctggttgctccagaactcttggtcacacatctgtctcacctgtggctcttcccctctgttttctgtgtgaacccaccaccagcttcttctccttggtttaccccaaacaattctcatacatggcatttgtgtgcagtggacattcctagttctttgtggataccagttgggggacagtagcacatagatagtttagggttaaatattagttttcttttaaaaattatcctggggaatatgcacctttgatatgacatgatgaaaatggcactttgcctctgaagtctatttcattcaaacccctaacctcagtctaagtatagaaaaacatcagacagcttgcaacagagggccgtcctatgatatgccttagcaggactttccaaaactctcaaggtcatcaaaagcgaggcaagtctgagaaacagtcacagccaagaggagcctatggagacataatgataaatgtaatgtggtatcctagatgggatcctgggatggaaaaaggatattaagtaaacactaaggaaatctgaacaaagtgtggtcctctgttctcatacctggaacagaaaatttctttctgcaaattttcccccttgctttccttgttagagtgctggccctggcctcctgccccatccatatcactgcccttctcttcctcataccactcctgctttggggcaactctcaatatcccccatccccattaattttttcatggagcactttaggggctctttgtttcaccctggctcatccaattcctcttaaagtgacaactgtctcttcccactgcaaatgaacaaactgtttgttgtgagccgatcctcagtccagatccagcttaccctatgcagttctggggaactctgggatcataatctttcagtgtggcctagctcaggacagctgaattgcaccaactggagcattgcccatcagggagagaagggtttactcatctttcaaggctttatctcaatattaactatatgttttccccacgatggacattgaactacttctaaactatgtatttaggttgggaaaaagtaacttccaattcagtgccaggcactgaggatactcaaaaatgcccttagtaatgaaccttctagaaagaagttgaattcactgagtggcagatttcatggtaagctttcaaacatcattgttcctgcagaaattatcttcaggttgaaaagtgggttctgagccatgttattctcatcaaggccatcctaacaaaaataaagggaacagagggaaaaaatagttacacttttctggagtagcagatgggttatctcatttaatccccacaacaacatattaaaatagctatttttgtcccagttagagacaaggaagctgagatgtgcatagtggtatagcctatgagtggcccgtccagagtccaactgtgcctgaccacaaagcttgggctctattcaaagccctgtctcctcactgcttttccagaagtcctggtgccaatgtcattggaagtacttgatttttttccgtgttcttgacttgtgcctttactttttgccagtgctttctagaggtagaagtttaaatatgcatgtcagttttcatcctcatcaacatcctcctcctcctcacatacctctagtgaatccgtggattcctgtgagaggttttgtgagaatacatggaaaggctgttcaggtccaattctcttccaacccaagatgaatctaagagcccaacctcccagctgcagaagatggcatgactttctacaagtcattacatattttctcatgtcttttccagatttctcatatgtggcaggcataagatgaagggaaaggggaggataactggggttaggtgggcagccaggtaaataaaaatagagtcaagaggccaggtcagtgtttctggggtctcagggtcttttattaagccatgtcagccatcaacagaaggcatgactttgtgttgatgccctctgtgcaaccagttggtaccactttggaccatcactgtattagtccattctcacacagctataaagacatacctgaggctgggaaatttataaaggaaagaggtttaattgactcacagttccacgttgccagggaggcctcaggaaacttccagtcatggtggaagatgagagagaagcaaaggcatgtcttacatggcagcagacaagagagagcaaatgagcaaagtgggaagagccccttataaaaccatcagatctcatgagaactcactatcatgagaacagaatgggggaaactgcccccatgatccaatcacctcccaccaggtcctgcccttgacacatggggattatggggattacaatttgagatgagatttgggtttggacacagagccaatctatatcaaccatgtaacctttactgtctgagagaaggaatgatgctgcagacaggaggagtcaagctgaagaccacgatacacactgacatctcgtgcttcatatctgtcttagtccattctgtgtggctgtaacagagtatctgaggctggacaattcataaagaaaagaggtttagttagctcatgattctgatgtctggaaagtcccagggtatggttccagcatttttttggcttctgatgagggccatctgctgcatcaagacatggcagaagcagaaaggcagacgggcatgtgcaaggaggcaaacacagggagggacctcactttataacaactaatccagtctttcaagagtgaactccctcctgtaagatggcattaatatactcataagagacctgtccccatgacccaaatacctcctattaggccctaccttgcagcattgccacaacaataatcaaatttcagcctgagtattggagcagaaaaaccatatttaaactgtggcaacatctttaggacacctcaagggaaagatttttggcattgggtgagggggcagatttgaacagcattgtagcaaacacagttgatgcaacttagtgggtttatgggggttttctgagttcaaaaaattctgttacaacaatgatagaagcagaattctgtcatatgctttcctaggagcagcctagtttctgttaaaccacatgttaggctttgagccctgaaacttaacaactgtgtagagtaatatactgctagaaaatagttagcctgtacaaccaaaacaattttttggagtagatagagctttttgggttggggccacaaaaattctacaaaaaattcagactcttttgatggtagaaatctgccttccaggagggggcaggcagtaccattgatggaaaatttgcaaggaaatattttgttattatagcactattacaatgcaataatacacaatgcaattaaaagatcattatgggtgaaaagaggttggaagaaaaagtagaaaccagcagaagcaatgtaaatacatgaacaaaatctccatatttccttattaaaaagtagaaggcattaaagaggttatttgctacattctaagaatctggagagtagaaactgaaataagtagggacttgggctaagaaatgatctgtgatagctaagttactacagagataaatcagtgattggaaagttacaggtaagttacttaatgttcatggagcggcttttcctcatctttcttctccttctcttcattattattatttgtagtattactctgagagcactttgagggttgtacctaaatggctaagctaaatgatgtatgctctattatctgtaaacacatgtgtgtgcacacacacacacacttagatttatttctactttctacatttttcaggcctgaaatcaatctaagagcttgggcctgtctggcctgcagaaggctgaaagttgtaaagtattaggtcaaatcatatgaaattgtttttgtaagtcaaaaacagccaaacattagttatttcatatgattcaatatgggaaattctagatgtatcacaaaatgtaatgaaatgtcatccattatctggtagtagttaccaagacgaagtttcatgctggaagaaattaaaaagcccttctgaggtgtgtctttttttgccaggcagaagccaccctgggctctcatagccattggccccgtctgagaatcagatgacctgggttttacttatgtcttcattaaaagatatgataattaacataatactctctcccaaactatgtgttttttagagtttcttctagtcaaatgaaataaatgttgaagggctttgaaaagctaaaaattatgttgaagtaacagtatcatcattacgaagtgtggggtaatagactgagggctgttcagaaacaggagaatggaatcttgaataatagaaacccactcagatttcttggtccattctgagtagtgaattcaccagctaatacaggcaggagatttctccctttaatgtgagactgggccttcagagcttggcttaggtaaaaatggagacatcatttggatggtaccgtatttttttgaattaaaaataactgtagctttgtgctgagaactgcaaggaacaaatggttctgtatgtcaccagatttaatggagacaggtggtgtgctcggctcagccctgggggctttcctcacttgcagagactgcttgtgttgccaaattccaagatggtttaaggctgaaccaatgaaagctccaacctgcttctcctcctgtgaatacagtagaatccaatcacaattcattcaggactgtctcaagcaactggggtcctcagagatgcttggattgcattttgctagcaactatttttcactaggcaatggggcttcaggcaggctctttcaggaacacattcaccaatttgctcggtatgcattgtggggctttgctgggattttacttggaggggaaaaatttatgatagaatttgaagaacacaatgtgaagaaggcatatgctgtttggaccagcattttttttttacaggagagtgatgtggagggttttgggaagagggtggctagatggcaggcacaggaagtagggaaagaaactacaagccctttccttgtgccaggtactgggccataacagtgcaggcattacagcaagcatttttcacagcgtcctgagtcaggaagcattgtgacccatcttagggataaaaagactcaggtgtgacagcagagcactctaggcagtaccttggtgtcaaacactgacctcaaagagatgagtttatgagtttttgtttaccacggcttagtcctagatgattaaactccagcctggaaaatctatttgtcacaaaaattatctattgatctgcttgtttgatctggaaaagttgctttaaggtacaaggggctatatgaaatggaagttaaatctatttttttttttcttttaagaaaaactgccctttaaagttggccatttatttccagtttttgtgatttcttcaccttggagcaaaacttctttattctgggaagacccacttgagtagcctcttttagctaagtagatataaagccaatacctaccgactccagagtttggggcttagagaaacctggaggtctgtagatgggtgacattggtcataggctctccaaaacttattattatacaaagctgaaagtgatgggcagatttgcttaacacctcttaaggggcaaccaatcatattctgtttctctttgaggctctgacttgttctcatggctagtgatctgggtgtcacactacactggggttgtcagaggggaggttgctgatgttgaaactcctctggctaacgtgccttggcagagcatctggcatgaaatgactgagggtgagtgcatgtgtgtgtgtgtgtgtgtgtgtgtgtcaattttaagagctgtgtcaacaagctgctctgatgctgggaacgtaggcctactctggggtagagagtccaagagagtgaggccgggagagaagaatcctcaccctctgctgccttgctggtggcagtgtggggccttggttcccagaactcttgctggcattgataacccattaggccttgggttctgagacgcctgctagttggcaggccctggcactggaagtctgtgttctgcttttagcagcaaaactgtagttgtctcagtggcagagtatgggacacttaaccaattgattcgactttctaccttctcctctgcaaagagacagtagccacatctgactacttggattgaatattgggcccctaggattcctgtcccttccgaacaagggtttctcaggaagtaaggcatctttaccaaaagaggaattgatcttggattcatattgcttttacatcaaaatgtggtgaagatgaacttgtgttccctaataaaagtccttggatttaaaacattcctttgaattatttgatgctgtttgctttcctcatcttaagagaaatggagtccagcacacttccttggcaacttccgttgtggtttacaacactgttcatgaatcaactgctaaaattttcaggctttaagggcatagtaagcacgatgttatcaccaacagataggtaaaaaatgaaaataatttgaatttagtttgttccaaaaatttttggcagctgttttgaaagctctagttctttcccttcatcaagcattccaactgctttttatcatagacatgttatgtactgctgaacacacacacgtatatattctaaaattagcatcatgaatatatattattttatatcctaatttgttccccataatacattatttcattattatttttcaaaaacatgacttttaatgggtgcattctcttgtataaatgtgccatggtttaattatgcaatgtttttgacacaatggttatttccatcttcatcattaaaaataatgctgtgatgaacatccttgcacctgaatctctgtgatcttctctgattattcttttaaggtagactcctgaatatgaaagttttagattggagagcaagtttaagcttcttcatacctatgtcaaaaaggtctagataagaatgctaagtttaccacattctttttttttaattttattattattatactttaagttttagggtacatgtgcacaatgtgcaggtttgttacatatgtatacatgtgccatgttggtgtgctgcacccattaactcgtcatttagcattaggtatatctcctaatgctatccctcccccctccctccaccccacaacagtccccagtgtgtgatgttccccttcctgtgtccatgtgttctcattgttcaattctcacctatgagtgagaacatgtggtgtttggttttttggtccctgcgatagtttgctgagaatgatggtttccagcttcatccatgtccctacaaaggacatgaactcatccttttttatggctgcatagtattccatttagcacattctttccaacatgtattttaacctttaaaaaaagctttgccaacttgatttgtaaaaaatgggtaacttttctctttctcttttttttttgctttgattgccattgagttaaactattttattttactgatactttgtattttgtgaaatatctaataatgttcttttttttatcagagtattttttattatttcattatttgcaagtgttctttatattttagggatattagctcttcgtcataatcatggcaagaatgttcctaaaacatttatgttgtttattaacatacaaaagcttttattttcatccagtcaaacctatcaatttaccctttttgatctatttcaatttattaagtgacaaataattatgagtaatgtgggaataacacagcacagcattgctattccttacaaattatttaggcaatagaaaatcatttccaaaaataagtgtttttactttcaatctgctgttgctcttttcttttttaaacattttttaaaattatactctaagttctgggatacatgtgcagaacatgcaggtttgttacataggtatacgcatgccatggtggtttgctgcacccatcaacccattgtctacattagatatttctcctaatgctatccctcccctggccccccaccccacaacaggtcctggtgtgtgatgttcccctccctgtgtccatgtgttctcattgttcaactcccacttatgagtgagaacatgtggtgtttgcttttctgtccttgggttagtttgctgagaatgatggtttccagcatcatccatgtccctgcaaagtacatgaattcatccttttttatggctgcatagtattccatggtatatatgtgccacattttctttatccagtctgtcagtgatgggcatttgggttggttccaagtctttgctattgtgaacagtgctgcaataaacatatgtatgcatgtatctttacagtagtatgatttataatcctttggatatatacccagtaatgggattgctgggtcaaatggtatttctagttctagatccttgaggaatcgccacactgtcttccacaatggttgaactaatttatactcccaccaacactgtaaaagtgttcctatttctctacatcctctccagcatctgttgtttattgactttttaatgattgctattctaactggtgtgatatggtatctcattgcggttttgatgtgcatttctctaatggccagtgatgatgagctttttttcatatgtttgttggctgcgtaaatgtcttcttttgagaagtgtctgttcatatccttcgcccactttcttatgcttgagaagaagtgggcattcctaacacacgccttaagaagccttttggagtcattcttcctttggtgtttcccattctgtaccaaaacattttctgtttttatgaaatatgtgtgctgccatacctattttctgtgcgatatcattcttctttcaaaattaggcgaatccttgactgtccttatggataatttggatttctgtacatgtttagacatttagacagatgtttagacattttaatgtggtatttgtgacagagattggctcactattcaccaaacttctatcctcttccttctggttacacaggtaagtctctgggttatgggaaataaaatgactgtatgagcagaagtcatgtgcaccaattccaaatttggcccaaaccacacatttcaccaggtgctctcctcatactgtttccatggtggctttggaaaccatgcagtgaagttggtggagccacaagatggaaggctactgggaccctgcattgtcaccaatcagaaccttgcctttgaatctatgcaagggagaaataaaaatttctgttggattacaccaatgaaatcagagggttattggttatagaaactggcgttaccttaactaatactatattcttgtggtcaagttagagaaactttagatttgtaatagatatatgcaaagaaagtagattaatataagctgatgtcaaagtcggggggtgtgtctagaggcaagccattgggttctgtccttctattcataggtgagaggtggtgagcagtctggaaacttgagaataagatagttagaagagagccatgatcaatatttttgtatatttcaagatttttaaatgcgtggcttaagagaatatcattacaactagtgactggaaattaaagaaaggcatattttagctcattacaaataatttaaaataataggatgtactgccttggaaggacatgaagttccattaagtataagaggctggtcatttcctgtcatggattttttttcagtggaagtagaggagaccattaagatcctttccgtatcagtgagactgtgaactactgtaccacactattatcatgattgacttcttagtaatatctttccaggtggtttctctcttcctgagattgcagggctgataggctgtgtttgtgatgccctcatttgaatttacagtagcttgttgtgccaataaggaacttaccttctagacccactgttattaggtttgtttttcagttgtaggtataaaaattggatatttattggctcatataacagaaagctcataagaagagcaagtttcaggaaaaggtagatccagaaactcgaatatattatcaacacccagattctttccattctgtcatctgccatttgcagtgctagttctgtccggcagcagttctgtccctcattgtggaaagtgatgccagcaacaactggagtcacatgcttccttggtcatgacttcaggagttgataggttgcaggaaacagaagtgggaagtctagtgccatgttaaggagatctagacaaggaagtggaataagtggggtgcaatgagatgagaggaagtcaaaaaaccaggaaaaggagattggatatgtgtgctcagtaattaatagtttcttaggttctggagcagaggtatggcataatgaaaatcatgtttagaaggtctaacttggtgccatttcatttcgaagaggctttagtgaaaagtggccatgacttgaaaagaggtttcctttttgagggtctttcagtgatgtgttagagtagttcataagagtttataaaagccaattgttaaattttcaggaattttgtatgccagctattaaactgttggcagcctgaaatggactgtgaagaagtatttacaccatggaaattggcaaaaggtatgaatcagggctcttccccttcataaagccaatttactactacatcacaggtatttggcaatacatctttttgttttgttttttttgtttgtttttaacctgccccaggattatgagaaatcctagtaaatagaaagaaaaaataaattataagcccaaaataatatcacagaaacccccatggggtcaattataagttattgctctatgagaaacaaacctaataatctattctcctttattccaaattaatatggactaagtttatttatttcaaatgcctcaaaggcttaactctaacttagtgcttctcaaactttagtgtgcatgttaattacctggggatcctataaatgcagattctgatttaataaatctgaagagttgtctgagattttgcatatccagcaagatcccaggtgatgccattgctactggtctagggactttgaatagcaaggatccaaacctctttctgccactgaatttgtaatctgttgcaggagaaaagggtaaaggaagcaggctgttggaagcattaaaactaatttgactgaagctaggtgctgcataggccagcagccagattggcttgaatggctttagcaaatcaagaaatgaaagcaagctgaatggaagagatgtttatccttcttttgtgtttgtttctttgtagatagatcatatattttattggactatcaaggtaacaagatgaattacagactcgcaactggagtttggcagactgtgccatgacacagctttgtctataagacacattgcattgttttcaaacttgttgcccaggagtcatttttcaagggtgaattattgccaagtcactgagtttggtgtcactgaggagattattatgggtttttgagtggttaagtatggacttctgcatttttttttaaataacaaaatgaataagccacagtttggtcctttgctttaatagtgtttttaggaactctctcttttgagataaactgatgtctcttggactgtagattttcatctagggttttgaaatttcactaaatatatctgagtgaaatgccagattttactgctttttctgaggtttctctggattctgttttgataaatatttcactgtggcccaagccaaatgactgtaaagctaaagccagcctctgttttttctttggaaattagagtaggggagagagttgaggtagagtggaaatgctgggaccctgtagagttggcgagaatgtcctttgtaaatttgaattaaaagtagtagttagcatgctagacacagtggctcacacctataatcccagctacttgggaggctgagccaggaagatatctggaggtcaggacttcaagaccagcctggacaacatagtgacaccctgtcaataaaaaataaaagtatagttagcaaatggacaccagatccaaaataccccagcagtaccacagtcagcctttcagagatgctgcttaggcaacagtagttcagtttttaccaacaaaggactaatttatcgttggacaggactggaaactttgaccatgagatagaaaaaaactattgaacttgaatcctggaagatacctgagaaatactcaaatttacattgcaggatttatagatgaggaaactaaagcttagagaattttatggcttgcccaaagttaccctgcttgctggaaacagagccaaggctagaattcagtttccctgatattttttattataccacaatgttattgacttattatctaccagattctgtgctaaatattttacttatattatctcatttgattctcatcaaaccatctgtaatagctagcattcatttattcatttatgccatacatatttattacacacctaccatgtgccagccactgtccgaggtactagggatacaatcagcattacggcactcatattctttctaatgagaacagtagacaatgattaaataagccaaaatgtgatcctttagatagtgatgagtgctatggtgaaaatgaaacaggctgttatgatgatggtgggtgcctgaagagtaagagaatggcttcaaattaaggaggtgacatttgggtagagacctaagtgacaagaagagtgtctcaggcagaagaaacagcaaatgcaaagccccacggagggaaggagccggtatattcaaagaatagaaatcaatcagagtgatcagactacattggtgagggtaaaagtgaaataaagggtcctcaaaaccaaggcaaattgctaagggagtggaaagcctatggagggttttgaaagcaaaggagcaaaatgatccaattcatggttattattgttccttttctatcacttcctcattttacaagtgagaagtctaggttcacagaggttctgtgacttgcctaaggtcatccagctgttaagtggcacaggtgtcaccagatctgattcaaataactccaaatcccatgctgagctgtttccattttttccgataccagttttctcctccactagccacactattcctacttgtaaaacagtaatgccatcatgttaaatgaaattttttgatttgaagtttttgatacaattattttttcctgaaaaatgggttgggggcagtgtgtttcactgcattctactccattcttcactgcatcctactctaccgagggaacttattttttccctgggtaagttctgatgtttaaaagtcctctagcagctacttcaatgagttttttgtctgattggtgctgccattatcttttggacactggccaaatgcaccagaatggtatggtgggctctggtgcatctcagaaaatgtatagaaaatagaaacgaataatgtgggagctctttagtgtcctttcctgcaagcctgaaagaattagcaaatggcatcatctaaaggcaggctcagtcctcttctatccttctggaccatgttagcccaaaagccattagatagggctgaagaaggtaggtgttcactcagcctaggtattgtggaataggagagggatgctttggtggttcaggaaggacgttggagcccaagtgggatgaagaggtgtctgtacaatcctaaggtattgaagcctgagggggtgaaaaggtgtctgcagtagggagggtgggtgggtatcagcagcagtgagccatcgctatgagcacacctagtgcccagatgttggttcctaaataccattttccactaaaagaaactagtgatctttagagaaattacagatttcagaactagggcaggcaaagtacaagttgagcctgcaacaacatgttgtgccaaaaagtaagcctcaaagaatgatggggatgtttctgtaggacctagtagcctgctggatggacctcccactggctaaatctggaataatctgaatatcaagaagagtgataacagattataactcagtgaatgagacaggaatctgagttcacagtaatataaataaattaacaaataactggaaagttttttgaggactgagatatttatgcagtctcaaagtaccttcttatgaaatacctacatattacaaaagaaaaatgagtaatttactctggtgtgtctgccaggtttctccagctaacatcaccttgaatgagacaaattgaaattttgtgccacctgcaaagtccagatagaaggacacagcatcacttctgggatgttaccaccaaagatgcataacttgaacctaattgtgagaatacatcagaaaaactcaaattgagggccattaaaaaaaaataactagcctgtaatcttcaaaaatgccaagttcatgaatgtcaaggacaagaatctgttgcagattgaaggaagataaatagccatgacaattcaatgcaaccagtgactcagaactgcctccttttgctagaaaagacattgttaggactagtggatgaacataaatggggtctgaggatgagatagtagtattgcttcagtattttgtttcacaattttgatgttcatattgtggttataggattactacagtaaagcattcatggaatgataaggaaaaataccagcaacttactttcaaacggctcaaatgtgctgtttctgcaacttttctgtatatttggaattgtttccaaataatacatttaaaatataaaataaaagtgggctaggagttcaaggaattggcatcattcatatactgtccagttgtatttatactgaaaccttgtgaagcatgctagctctgaaaccaggtatccaggttcaaatcctatttctgagtgtccttgggtgagttatttagcctccttgtcctcagttttctcttctgctagagcagttgagggataatgacccattttttaggattgataggagattttagtgagacaatcacacaaagaccctagaacaggttctggcatatggcaaacagtcaacatctcttagatattgttcttattatttcgtaagcaggtaaaacatctatgtaatgtagccccctcagtcctttaataacacagctcccttgaacgaactccaaggagttttctccttgggctcgattcctccctacatcagtgatgtaataacgaagcttcagtttatgtgaccaattatgctgtacgagtaaattcctacaagcattatgagattaaggtaacagggttaaagattttcctaaaagctcttaggaagcctgttggtccatccttggccaactagatgtaattgtgtgatttgaccagacaaaaacatgtcgattacaagtgcccacagccaagactatggagatccaaaagttaatttctctgaatttagaattgctcattataattccatttctagaactggaaaggacctcagtgattacttgttctaccctctcattttataggtgagaggactgagaccctgcatggtgaaggatgccccaggtgggatcataccatcagagtttgaaccctgagctacgctgacacagaagtaaaatagtatgggcgatgctgaggtccaatagaaaaagtgtttctggaggagaagtgcacatctttttatggtggtggtaggaatttactagtttccaagtaagggacctctgctgtggggtacctcgatctatgacaccccagcctgggggctccattccaacagcctggtagggtctcagctctgaaatctcccagtttttcttaggagatctgcattacatgtctcacaccatagacaaagcactgtctcatcttttacttgccatccttgtgttccttcaggctcttgtttaaccagacaaggtgtcaggccttagcattggactcctgactgatctcttctgattcaacggttgagccagattcctcaagtgctctgttcactttgtgtccctttcacattttaggagactccaactatttttggtaggaaaacaaatatcctccaggctgccagcgagttttccaagacacatcctgattcattatacagctaccaagatacaaagccctaaaaatagggaacttgcttaaatctttcatttggcatcaggatgctaagttcatgttaactgcagtcagtattttagactgatttcatttgatttcctgggtattatgctctttggctgcggagggcaacttcttgtttatcttcatctctgcttggcttcagattaaggctttgtgctaaaaaaaaaaaaaaaaaaaaaaaaaccccaacttttctttttactacccatctgtttaataattattttcttttttccttttttaagcttacttgttatgctaacattactctaaatagaatgtttataattgattgcattgctcatttttaaagtttttccctttttgtttaattagaatttatggtatgccagaactagatccctctcaacaaagcaagaatcaaaattactttcaagcatcccagtgggttaatgacagggtctgaatttatctctgagctccattaaggaagaaacctttcctgttttcatttatttctttgggaggggggattaacatttcatttaaatatggcattttcagaatttaacttttccctaattggtatctctatattttattaaattgtaaacttcaggtagaatgcattttgagaatgaaagtgaagtgcaaccattacatgattgtatacttccagctgggcacaatggtgtgggctaggtaaaagggatttcagccttatgaagggtgttcttttttcaatcatttttcttactcagttttgtgaggttatgtaggggacttttaccttgttgtacatataatttcttgactgtcatccaagtaggcattatttaatggtccagagtagatagtctctctctctgtgtgtctgtctctctctctctctgtgtctgtctctctctctctccacctccctctccctatccctctttctctctcccctaaccgcttccttcctcagaatatatgtagatacttacgtgtacctatattgctataaaatttcaaagcacttgccttcggtgtgtgtttgcagtagcatttgtggcttagagacagttggggattagtgattactgtgacttggatagtctcactctgattaggtgtctctttctgccggctatgtttgggtaaacttggagaaactggtttgagttgattcatttaaacatagtcattggcctcacattctaaaacatgttacctttccatgcttggcatgtaaccagcctgagattttcttgtgttttggctgcagaagataggaaaaccatgattcagattcagtgctggccaaatgaagtctctttgggggtggataagcaatgttccttttacatccatgatttattcattatatcaatcatgagagtatggggttactttaaattataatttcaaacttatagaaaaatgtcaagaatagtacaaatatttattctaattcccttacctagattctcctatgggttcacatttttgcttgtttactttccatcattttctgttgctttctttctctgtacgtttttttctaaactactgggaagtaacttgaagataccacatcccattacccttaaatacctgagtgtgtattcctaagattgagcatattcctttcataaccacattaccatgatcaatattaggaaattagatactacaatactagtatctaagctacagtctatatataaattttgtcaattgtctcaatatcttctataactatttttaagatcagttatgtttgaaaacactgagttttgattttgctacctctgtgtttagccatttctcccctccttattgtatttaattaaaccgaaaatagattaagaattatcttgtttctaaagtactaatttatgttttactggaaacttttataaatatgtgagcccaagtcacttaagggcagagtctgttatgttgttaaacactgtatttcctagagtccttaacttactgcctgtttttgcaaaatgagcaaatgggtaagagtcacattttagaccccagatgtctcagcttcctaattattaatgatctgtgacttttattttttcagaagagtcatgtccttgggcttcagcttttgccttgttctaggctccaagataggcccagtaagtctactttttagtgagattttatatattcacatttgccctctctacgaaagagaatagttagtggactctctggaaggcacttcccttttgtttccctagggccaacgtcctccccccttctaaaatataaaactaggtctagggacttattgttctatccctatattctcatttaattaagactgtgaggcatttggcgatactttctctttaagcttcttcttcactctcgccttattcattgcttctgccatttattcacttggcaagacagcagtgatctgaaggggagagtggcggctatgggatggaggaaagatctctgggttctgagtgacatgaactaagccaaatcctggctctcttataggctgtttgtgtgccaaaatgggtcagagctccattttgcagataaataactgaggctcagagaggatcaaggacttgggggaagccatagatcatctatcagaggcaagactcctcgtcccagctctgcaatacttgttcatgaaaatattatgattctagaatcatgcatggcatttatgatgatgataatgatgattcttatttctatattatctttagcataagttatagtctactagtctatttacactgccaggaatggcgagtcagttttgtctcgagtgctaactggatcactttgtagggtctgcctggagtgctgtggaaagagaactctggcctcaatcctctcttctcctccctttgtcctctcctctctctcctcttttgccctcatgtccaaattgctcttgtttgttattgcagaacaatgcagtcatcctttcgattgaaagaggatgacgattgtttccctcatggtaagagtatttttctctgattagaggtagagagaatgaatcagggagaggggagaagtatgagaggtgggttcagaagggaaagaaaagcagaaagcaggaagccaggagaggtcaggggaaatgaggagggcctcgggctcagggctgggaatatttctgctttccatgtggcatgacccatctgggcaagggagaaggggtcactcaccgaggaactttcaaaggagaaaacgttctggcctgaacaaagtcctgtcatattctactgatgtccaagtcaccatcatgagttgccatccaaaatatggatgagtaagagacaggcttgctcctgaggtccctaggtgctgaggctccttctgccataggacggcccataccctggagtgcacttcaaatgcagctcccacagtacttgctatgagtgtctgccatgtcggctggatgctaagcccttagaaggccaggactgtgtctctctttctcaccatggtgtctacagagtctgtgagagttgcagtgcaattctgttgctgactacctggagttaggtcaagggctctgccctctacaagacttctcttatttcagacactagccacaagctctgggattgatggcggttttccatcagctcccaaagcccacaggccacctgcacttttgaccaactggctacaaatttgggaattcccattaccccctcagttttgataatttacttcattcaacaaaaggtgacgcagtcacaattctgtatgacagagatggctgtgccctctaaaatccacatgatcatcttataatagcaccttggcctaagttactctccttccatctcactgaatgcagtgtgcgtttatcaagtgcctgtcatgagcaaggctctggctgagccctggttctctttaaactgttttattgcaggacccccttgagatctctgatccttcattttaaaccctggcccttgcagggagattttcttggatcttggaaagggcagtttgataattgcttgtcatctttgttttacacaccatttagtgcaaggtagatttttgctcaactcttaatgtctctccagattggaggcaagagagctattacaaagatgattggcataaggtcaggtcctaacagccatcagctgaccctcggttcacatcatgaagacctctgagggactgtggcaactttgtgcctcctacaatattctttaagttgggaagcaccagcaatgagagactcttaggttgaggagccaccgtcagcagcggctagtcttcatctggtgacagatgaaatgggtgacgggggtgagccactgccccatctgccccaggttggaagggctgctgtcattctcccaaatgtgaatgtgattgtcctgacagctactccactctgtgagagactggagtcttgggccagcgccagaagcattcctgtgagaaatctgggcttgttagcagagatctaggatgtgcagccacccaaactcctcaaaacccgtggggatgaaggaaaggagggagatagaaggaaacactgggaaacagaaagtgttacttcttaaaaaaaaaaaagaagtcttgctattgcctctgacagccagctctgtcagttgcatttgtggccacacaggcagttggcaagccgggcagagaactctgctctcatcttcacaagctgcagatctcctgtgctcccttagcaccctggaaaaaattagtcccagggaactatgcagtgccatccacacttaagggcctctgatcatcacaacattcaaatctttcccactgtgtttctatctttctccttagctggggtgtgttaggtgtgaaatttgccttcaggccctgtgggctttgggagctgatggaaagccccattaagagcctgctgacaacacgggtgctctcagctgtgaccagagatgagcaggggacaacaggcctgggggtgtcaacactggaaatgattctcccaggagggctgagatgtgtctggtgggtattgcctacatggctttgcctagtgcctgcagcccccaaaaccaggggtaagaggaagtggggttctgccagccaaggatggatggcagatgaggccacaggaagaggaggtgctggaatcaggaagagatgtcagagcttggcggagaagaggcagtttgtaaggctggtagatttcagcggggtctggtgtgagagggagccgaggaagaagatgtgagtggtcagttgtttcatgggacagacttggagtcctgtacttgcattctttgcgtggacaagacccagcactctcagttcccttaggaacagaggacaaggagggcagctctctggggcttcctcccagatacactcagcagtcggttcccacttgccctcctgcccggcatcttccagggattccaagaggagcttgggtctaacactgccctaggaagaacttgctcctttttttgttgacatgataaaaaagtaatcagagaaataaggtgtttaaacaatactttagccagatgaccccttcctctctctcgcttagtccaggcatggctgtgccttgactgacattggactccatgctctggagaggaccaggggctcagcatggagggtgctggccacttggtcctacctgtggatgcctgagggacagtctgaagcaggacaaacagaccacagaagttctcaggcatctctgtagcttgaggatcaggatggatatccatcgtggaaacttattgctgaacgagacccaggaaactgaagtaagggggttgaatgacttaagaccatttatttatttgttcaagaaacatttgctgagtaccaggcactgggaggaatgttaaaatatgatacacacatgaagtgttttaggaatcacctgctccagaaggctccagtcatgactgatggcaggcacggggcctcgtcaaacccaggtgcctccaaatcaagccccatctgaggcagagttgagcaggaagtctgtgctcagctttagtccagcctctggtacgctccctccctgacatttgtggagcatggcctcttctctaaattcttccgtcttcgccagctcctcactgtcttcactctaagattgctgaaggtgctccagttgcctccatcagcatgctgcctgtacacctccctgctcaagtctttgagttcattaggtatattttcaatcttccaagttactgtaggtaacaattataccaaacgttttgccattaaaaaacatggggtaccatttttctagcctcctataatactgtcctcatcgttttttctagcctctgaaaacatatatattgcaacaggttgtagttataatatattgctacctgtgacctattcccaaaaccaagaccaacattggaaatgattctcccagaaggagggctggctgagacgtgtctggttggcattgcctgcatggcttggtctagcacctgcggcctccaaaaccaaagggtaagaggaagttgggtacctagaagtggaatgctgctataataaaaactacacactgtagtgtttagtacttgtaggtacctattgccatctgagtcaactctgctgtggaacaaataacctcaaaatatcagtggcctgttacagctacaagagctggtttctagcttatgggactgcaggtcgtctgagcttggttgggcttggattcaagctgtgggcttagatcaggtctgttccatgtggcttattcttcttggaccaacaggctacacaggaattctcttctagtgcagtgtcagaccttcaataggaacaagtggggggacacaatgtcttttatagcccaagctcaggctttgttcactgtactctgcccacattccacgggccaaggaagtctcttagccaagcataacctcactgaggcacagatatacattctgcttttagtgggagtgactacaaatcacacagcagagggagggctgacgaaatggaaagataatgcaatctattatactgctgcataggaaggctctctgagggtctgatggtctcttaagaagacatccaatgaatcttcttgcttttggtcccaacaaaatttcattactgttgtctcttttcacatttcctacttttagaaatgcctggtcctgctaattcctgagccatttggggattatgcaacgtaaatctggttgcttcttggctttccggctaccgccttaggattcatattttcaggtttgttgagtcagtcaccacttgcccatctgctttccagcttccaaaatttcattactgttgtctcttttcacattttctttgtccttgtgggtttatgcctgtaataaaatccttttactgtcatttttgtggggtttggggagagagcaaggctaaatgcatgttttcaatccatcatcctgtcaacctggctctttcttgacgtctaaatgatcagccgcctttccctctcagctgctccggctttaattacgtgctgctcagagccccttgttgcctggtgacaaccaagtggaagaactttgatgaagtgcctgatggatggtgactcacctctcagtctggatgattgttggaacacaatgtcagctgcagaataaccctttctgactcaatgttgtgtccacaaacacagattttaagaaaccaaccacctcttcagagttttgaatacataatatcacctgatttttttttttgtctcaacctggggcataaggatcattcagttgctggattttcttaagttaaattgctaaagaatacaaaacataaccacttggtctatttggatggccttcagttattttctatcagcccattggaaatgatggggctgggaaggatactctgtaactgagagtttgatcagctgtttagtgtctttcaaatgtggattgaccattggagcttaccatatgacagacggggaggccgagttattaacatttatttcctgatgtcgtttgacccacagcctctctaacagtaccagatatgtactgctagcatagcaggagttctgcaggtgaaagccatcttgaaaatgaatggaaacatttttggagtgctatggagacaaggacctacaaatgtatttccaagcagagaaagaagagagactgacctgtgacgactagtgaaccttcaaccagataactagggttcaaatcctgagtgtgcgtcttacattctgcatgaccttgggtagttttcttgatctcttggataagaaaacagctctctttcctcacaggattgtggggtaaattaaaggatcaatgaaagctttttgctaaatgaaagttctatgcaaatacaagtcttatttggggatagttatgaatataagtagcttatacaaggtgggtaggtagtaagcagttcatttttatgcactttttattacttggaacacgtggcacctggcagactaaatgaactctataagatgttttctgtaaggtacacttaacaagaagcacctgatgggctcttggtacatgccaggtcctgttctgagcactgtatacaaagtaagtcatctgaacctcagaaccactctataaggcagattctacagatgttgttatcaccattttaaaatgagggaaactgaggcccaggaagctaagtaagttgctgaagctcatcttgcttactaatggagccaggacttccccataggcagcctggctccgggtcttcagggtaacctccgccctgcactctggggttgtgaaatggccgccatgcacatttcctattcttttcaactgttcctttctaggctcttcttcctttggtgggacacaaaatgttaatgtcttctgggttctcactcaggctttattctcatctcagtaccctctccctgagcagttgctacttatccatggttttaatcaccatctatatgctaatgacttccacatctgtgtccaaccctggtctccctcctggttcccagagggattattcaactgcttactaagtgtcttgccttggatacattaaaatcacctccaactcctcatatctaaagttttactcctgatttttcttccgatccactaagccttctcctcagtctctgagcacccttcaccgaggtaggtaggaagagtcctgagatcatccttgggtctccttcttcttcacctcctatatccatccagctcatatctaagtcctgtcaacttggtcacctaaatagctcaacattgtctgtttctttatatcttgggccaataccttagtccaggccagggccatctcttatctaaattattgcaacgtcttccccaaacagtttccctccctcagtagttatctcacattgcagtcaacaggactttttcaagatataaaacccatcacatattttcctgcttagaactcttcaaggactcctaatgaccttagataatggccagcttccttaacttggcttccaagactggccataacctggccacatcctactgcttaccctcagatttcaacacagtttttcttacatcttttttctacagccattgtaaacttctttcagaatctctatgcacctctctcttgcctcaggacctttgcacgtgaagctgttgcttttgcctagaacagtcttaatccctcacccactacacttttatgtctagctccttgtcatccttcaggcattaactgaaagtggaaaccttttctgagaagtcttccttgatttttctagcctttgttaagtgccttatacaagagggcttcagaaagttcatggaaaaatggaattaaaagagaaaaataaaaaatataaacttgatttctcagcataaacttcatcaaggtcaatacaactttgtaagtgatgatatcagctgtttagtccatccccaaataactgaggatcctgggaatttatccatgtcaatgcagtcttttttacattattaactgaaaatgggttctctttaataatttttttaaattagggaacagaaagaagtcagaaggagccagatcatgactgtaaggtgaatgcctaatgatttcacatgaaaactctcacaaaattgcccttatttgatgagagaaatgggtgggaacattgtcatgatggaggactctctggtgaagttttcccaggcatttttctgccaaagctttggctaactttctcaaaacactcgcataataagcagatgttatcattctttggcccttcagaaagtcaacaagcaaaattcctcaagcatccccaaaaaactgttgccatgacttttgctcttgactggtctacttttgttttgactggaccacttccacatctcagtagccattgctttgattgtgctttgtcttcaggattgtgctgataaagccatgttccatctcctgttacaattctttgaggaaatgcttcaagatcttgatcccacttgtttaaaatttccattgaaagctctgctcttctctgcagcagctgacctgggtgcaatagttttggcacccactaagtggaaaatttgctcaactttaattttttaatcagaattgtgcaagctgaaccagttgagatgtctatggtgttggctattatttgggtcattaattatcagtcctcttcaattagggcacaaacaagattttttttttttttttttttttttttgctaattgatgtggatagtctccactgagggctttgttttcaatgctatttcattccttcttaaaatgtattattcatttgtaaactgctggtttctttgggacattgtccccataaacttttcataaagtgtgaacgatttcatcattcctccacccaagattcatcataaatttgatgtttgttcttgctgcaatattagtagaattcctgttgctctgatagggctcaattgaaaatgatgtcttatcctttttagtgactcaaactagataccgttctgacatgttataaaaagttagtatgagtttattttggtgcaaaaaaattgagctccatttatagtttttaaaataatatgcattttccataaactttttgaagactcagttttacctttatgtgacactggctataatttgttgcaattggtttcttacttgcctgtctctctggctacattgtaaattccttaaaggcatgctccatgtaggtctagctcatcactgtatcccctgagattagcacaatgcctggcacataacaggagttcaataatcatttcttgaatatttaaataatgttatataaaaacatcaaagattgtaaattaccccattctcaaagtaagacccccaaaaattcatgctcttttttttcatagatcactaagtgagaaggcaaactgaagacggagctttgctttattcaagacattgggaaccaaaagaaagtaaaaggcagattttcctccatctctttttcagaaattctgatgccctatttattaactgggatgcttgtactcctagggaagcgataatatggtgaggagacaatcatagatgaggtgggagggcttctggagcccgtttctaaatgctttgtgcctgcagaaaaaggagagcattgagaacttttttctaaatggaacaaagggtgtgactggcacaccatttagcctcgtttaccaactcttcaaacactaaaattcttgcctggcaggagataggttctctagaagcttaggaacctttgaaagcagggattgaggacaatgtctggactaacgttggccattataaaacttgtcttccacgtgacacatctatcaaaaccaagcattgtctgtcttcagtagaagatgcattgttggaggtgacatgggttcgcagtgccagcataagcatttttacctaaacagcttatctcatgctcttttccgtactcactgtggtttaatttcctctgtatcaatctcttcatccataagatggagagtttggctgatagcaactccagtcattaaatagagatgaagttctacatgagaccttctattattctcttacctcttttccattttcctttgaataacttgtcacggtttgtgtttataagcttgtttgctttacttgtttactctctgctccattccgcattttagccccttcctctcctcgtcccccaccttcatctccacccaccattgtaaggtccatgagggcagggactgtgtctattttgatcttctatccccagagcctagcatgatgcctggcacatagtagaggctcaataaatgcttgttggaaaagtggctggttgaatgaacaccataatgaggaaagtcatgcagtggctccctggctttttgcatacattactgaggctctccagagagtcttgctggggttactgatttattgtaacagaggaacaagaagaataagaaggcctcttaacagatgtcacgtaggacacgaacattgctctgataggccagctgtcattccactgattttatgtcagttgctctctcttttgtgttgtgtcacacatcagccccaactaaaaggaaaggctacaggctgggatttgaaagataatttaatgaagggattatttatagaggtgtgggcaagagcagaagaaccagatgggttgctgaagcacgcggggactagcaatagtgagaagctgttgttactcttgggcctgacaggaaatgctggagcctgggagaatggaggtgtggacagggccatggatgggagccatagttaaagagggctgccatcaccattggaagcgcattgtcaggcaaagagggaataggaagaaatactgtaaactctcctcctgctctttcatctcctgcatggtctccaattggcactgcccaatgggaaaagggatctcaggtgatacaggtatagggcatagaggtcagccttctggggcactggaaggcaggagaaaagccagcatgtgccattactattagtgattttctctttgcagagagaggcacttgtgatcaagttcatgctgctcacacatactccagtcgagcaggcacctgctgttccttgacttcagtttacagcatctctctgttttcttgcttctctgccactctcctttctactgttctttataggtcttgcattcaaactcttccagagaaaatctgatggtgtcaccctctgatattggacagggtacacataagcagcctgtgaaaactacctttaggtggggcacctgtctttggtccagttagctacaaagcaggctggacttgcccgtgacaaagactctctcaaaaagggtgataggagacgaactcctcagaggaaacagtctgattggaagccaccttgcatggcttgtctggtacatggtcatcctcacttccactccagtggtgaccatcctcccatatgaaggataataatatcaatactaggctgctggaagggactagctaatgcttactattagagtaagcaggacaagttgcccctgtttttttctgtttttttttgtttgtttgtttgttttttgttttttgttttgtttttttgagacacagactccctctgttgcccaggctggagtgcagcggtgtgatctcggctcactgcaacctccgcctccctagttcaagtgattctcctgcctcagcctcccgagtaactgagactacaggagcccgccaccatgcctggctaatttttttgtatttttagtagagacggggtttcatcatgttagccaggatggtctcgatctcctgaccttgcgatccgcccgcctcggcctcccaaagtgctgggattacaggcgtgagctacggcgcccagccgacaagttgcccctgttaattagattcaccaaatgtgcccagcactggtgcgtcttcttaacgtgatgcctcttcagctctctcccctgctccaggagtgactgggatatctgtcatgcccccagatattgtgttcagggtctggttcatgagctggttttcttctgcttctaatcacaatagccatagtcatttgtattcatagaaagtaaatgcctctgtcaatgaggttcctgataagaggaacggggaataatgcctttttagtcctaatcagccctgtaaaacctcctgcaaataggaaaggattgttttctggcattttagattatgctaaaagttgagttttaaaaaatgatagcaactggttgttggtaaagttctaggatggcagccttggtgggtggcagggatgcttttctcttcgagtgcctgttctccctggatggggagtctcttttttgccacctgcttcaagagcagtgagtgcggcaaccccagagtacttactgtgccattgcaaaccatttctcaatgccagaaccccccaacaatgtttggttctctgtacacactctttgcttcccgctccagaacacacttcccctttgccttcatcttgcaaaattctcatctttccagtcccagctcaaatgccccttctcatgaggtggtgcttagggaaggaggctctgcagtcagccacttgcatgtcatatctagtccaccactcatcagctggctcttaacttcttcatctttaaatatgagatggtaattggatgaagctgtatgtcacagtgggtaagcatgtgaatgttagagccagattgttaagtttcaaatgctggctcaaccacctacttgctatgtgaccttgggaaagctaatgaacctctcaatgcctcagtttctccatttataaaatgggggtagtaagatgtatacaaatttgttgtgagaattaaataagttaatgaatgttatactttattattctctatctcactgagttgtaagaattagttaggtagaacacgtaatcatctgggattatgcttgccccaaactcagctcttcctatgtaattggggtagttcttatgttctgttgcattttatttgttattgcccaacatgccagagaggggttgtgcctcctctgtgttctcctagtatattgattatacctctaatagtatttttcatactgaattatcattgtttggattctgttttctctattggactgtgatctcttcacaggcaagaatagatcattagtaaatatttgatattcattaaaatgaaaagttgccatagcacagaaaggtttttggcctcaagattggtgttgaataacttgtctgtgaagttcttggtgcagcgagaggccagcagcagacgggttaagactcttccagtgcatctgcctctcctcattgtctcatatgggttaccaagtgcagtcagaacatgagttctagttccgagaatgggtgtcacctattctctagacaagctatatacagtgttggaaatgaatgatgttaagtgagacttggattctctccttttcacttcactttaaataaagtgtttgcttggtttcaaagtaggtttcatacccttgactccaaatggaattctaccaccatgaagaactgtttcctctgagaaaaagatgagtcattcaggtgatggctaaccaaaatcctggggaaaaaagaaaaagaaaagaaatcataatttaccacttactggttttggttttccttatgcaatcagacatatacctttttctaatttgaagccatttggcttgtgcttgtgagatattaatgactgtaaaatagctgatatcaaacaatcttattttcgaaattgctgtagttaagactgatggtgcttttagttaataccccatgtcagcctgtcatccctactcccccataaacatttttgcaggtgcctacatatgacaaatgtaccacaaaatacccaatatgagtccttgtttgtcatattagttggaaagatgcacagaagttatttttggaatcttgttcataagtttgttatgcatgagaagaatcataaacactagtttatatacatatagtgaatgaatgaatgttatattagatttctgattcaaagtagtctgtgtcaggggtcccgggctggtactggtactggttcatggcctgttaggaaccaggttgcccaggaagaggtgagcagcaggtgaaccagcattaccacctgagctctgcctcctgtcagatccgcagtggccttggattctcataggagcgtgagctctattgtgaacttgcatgcgagggatctaggttgaatgctccttatgagaatctaatgcttgatgatctgattatctgaggtggaacagtttcatcccgaaaccatgtcctcccaccctggtccatggaaaaattgtcttccaggaaacaagtgcctggtgtcataaaggttggggaccactggtctatgatagagaaacatagactacttttgttgtttaaaatgtcttatagcctagactgcagagggaaatttatctgatgaaatgtctccattacatttgttattatttcaggttagattaaaatcttagctgtgttgggtttgttccttggtgaaaagttggtatttaccctctttaaaaaatccttttaataagcattcttaattttatcttaaaattattttatagctttgacggtgggttctatcaactcaaggtcctgtttggaagcctgtggagccatctaaatgtgttagctgtagcaagggcagatttagctgttctgtgtgatgcacctttagcttagaaaccactcatttttattctgtttttttcattcattggctggccagttaggctctgtgcagtttatccaatatgttgtgatgctttatagtgtcttttgtccaaacctagagcttgtctccttctgggtttaggttgtctgttggcttaacagctgtgttcattgtactgtgtttgccctctgagtttcccaaaacctgctgtgccagctgctgtttgtataggctcagtgggagaaaaaaagccatcacactgaagattagacagatgtgggagctctatccagattcaaatatctagtgctgtttggtatatttctgctttacctgttggtgtcatcagttgatggggacatgttgaggctatctaaaatggactcctcttttgcttccatacacatttcctctgacggatgatgaattactgattgttatatatgtccacataagggtgtcgctaaattttcttggtttgctttagtgtttatctcccttagtcagtaagttcttatcaatatctaacccagtttcttcctattgccacctaagggaatcaattttccttgaatttttgctctaataattacctttctaaaagtatttgagattcatttctacatgctgcatgcagaatattcttctaggtactcctcttctcaagattgcaaatggaacaaaattcactatgctcaagatgtggacaaatgtttaaagaagtacaactttaaccttgaaaagaacatacatgataaaaacaaataggaataaaggcaggctaattgccactctcttaaaagccgctcttatatgctgagttggctctcagagattttggtcttttatagtatgatgagaaaagcacccatgggctttaaaggaagactgacctatgatcacatggccacttactagctgtctgatcttaagactattatttaacttctcagaatctcttaatagtagtggcctcatggaattgttgggaggatcaaaagacattatcagatgggaaatacctcaccaatggtaggcattccgcaatgctcatttctcttagccaggtttgtcaatgcaatgtgactgttatgtaataagttgatcagtacactgaattcaattattataaagtttcattaattacatcagaatttgtagctatttggatagggttgagctgaagtttatttatttattttttttactaagaagaaaggattagccaagcaaatttttctgtcaaccagaatggagataagaagaaaagttaagctacttaaagcttttagaaactccaatttgcagataaagagaaagaattaattaaaaacaatcattatctaagtcattgaaaggattggggagacaacctacttagtaatgcttgccacgggttcatgtacaattggcttctgtgtgatttacaaaggtgtgcctcattaaaactagtccatatttcagacatcttatcaattaagatatgcttttcattcaatgaatctgaatctgtgaatttctctagcattgaaaaaatagagcattgaatagaggtaaagtgctgtccattggtcaccaaagctgtgggaaagatcttcattcacttgtactaatttatactatcagtgcaattcctatttcctatcccttcattaatttattggacatttattgaaagacatcaaggactgtgggtactcattgactaaagtagaagactttttcttttggcctcaggctacagcgataaatcttgcctttcctaatagtgaaaatgtgctttcttcctttatatggaaattccaatcagatccaagcactgatagatctcagacttaaggtatttaataatgacatttattgcacattatattccatcctttgaatgaatacacatgaggcaaaagttaattgtttgatttccaaacgtgaatacaaggagggcaagccctttgacaacaccagacagatgctggtgatcactttgcaattatcagggatacatggggtcatgtccctgtgctcagtacaggttgagggtctgacctcagcttcaggcttgaggatacaccataggtaattatcattattaaaacattttcttggatgaaattatttgttgcatctttctattgccacttacaagtttttttttttaccattatttctttgtttgttgcattattaagaaataattagaaataataagactgagattatcctacccatcctgatgctacaattttgatcttgtcttcgcattattatcccgatatatgtgatctgaaaactgtagctgtttatcttggagaacaagactgttactagactctgtagaacataattgttaagagctctggctctgagtcagactgtctggattcacatctccatggctccactgaagtactatgtaaccgtggaggacttccaaacctctgagctatggcttcactatctcttaagtgggcataagagtgtattcataagagtattataaaggttaaatgcaatatagcacataaaatgagtttttaaatatgtatatgtatcatataaaataaacagtggtgatttatcattacaaccagaagtctaatgaggctaatattatgtcaaaatgagaaaataatggattcttgaaacaattgcttattgagttcattaaattttaggatggattattaagcagaaggtttatcggaatttttggaaagagagagaagcagtaggggctcataaagaacaagtcatggcgcatcatggttagagcaggagcatgcactagacttggagtctgtggatttcagaaacatctttcctaagtctttcatagtaacctatggacaactgagaatttggggctagtacgtgacttggagaccatagctttcagttatctttctcaatattctccaggacaacattctgtttgttttcctttatcacataccactaatctaattatttggctgattcatttgtttatttattgactgtctccctacaagagtgtaagctccatgagggcagaaaccatgcctgtcttgatcacatttgcatcccatgacttcatacaggacctagcccatcgccagcaatcctcaaatatttgtggaatgaataagaaatgagaaaattcttggctggtcaaaaggtgtgaccctgtgaatttcattgcagcaccattcacaataacaaagaaatggaaatgaactatatgcccatcaatgacagattggatacagaaaatgtgatacaccatgggatactatgcagccacaaaaaagaacaaggtcatgttttttgcaggaacatggatggacctggaggccattatccttagcaaactaatgcagtaacagaaaaacaaatgccacatttttacttataagtggagctgaattatgataactcatgaacacaaggaaaggaacaacagacactgggttctacttgagggtggagggtgggaggagggagaggagcagaaaaaataactattggctactgggcttagtacctgggtgatgaaataatctatacaacaaacccccatgacatgagtttacctatataacaaaccttcacatgttacccccgaacctaaaataaaagttaaaaaagagatgtgaccccaagagcactggatccctagaatgatgtctgttttaaagcatcacttctttgttaggttcttcttggttaggatcatttaatggtttattcattcacaagaaaacatagaaagcttgctagtcatctctgtgattgccagaagttggaagatgtagcaaatattatgaaacaaaatttaaaattatctcaataagccaaactttaagtcagtaagattgaaggaattaagaggaaaaaattaaatgcctatgtttattagatttttaaaactcagtttcccagataggatacaagagacaaggtcctgcaggaggtcatgtggaagagagttgggttttaactggccacacaatattctgagcttaaaacactatatcgtggtagatttttaaacatgaacctaccctagaccagcggttctcaaccttggctgcatattagaatctcccagagcactggtaaacaaacaaacaagcaaataaaaacatactaatgtccagacctcaccatcagagattttgactcagtttgttttgggaaggatctgaatattctaatatattagcaaatctaatagggttaagaacctctaccctgactttgctcttaccaataactacataccttctataatctgttgctagcattctactttctgattattaccttctatatttctaaataactccactgcaacattttttgccttctaggacctctgatccattgactttgccacctcttggctgtttctcccttcatttccccatttctcttcatggttccattctagtagtcactgctttgcatatgccttcagtacctcgcctcctcacctgacaagtcctaaccatgattattaaatctaagagagactgaatgtggttggagaagaatatgcaaacttgctgattggtcttactgaaaattcatgactgcaaatgtcaggtagaaaatgccatgttagaatcctactaaatctccttagtcaatttactctcattcttatagataattgttgcacccttcttctctaccaaacctcaaaccaaccccctcctcactctcagctgatggccttgcctccctcatggagatgaggcaatcaaagaacttccacagattcctgctacaaaatctattcacctccctgcatctggacctgtgcactcttcactcctattaactaggatgaatcatccctgctcttactaaagccagcactaatcgtgtgctccgcatctcatctgttctcttacttaggacttggcttctgcaattggctgccaatcaccactgcttcattgattttcctgtcttccctgcatcatttccatcatcttacatagtataatgtcttccatctttaaaaaaaaaaaaaaaaaaaaaagaatctcttgatcctctaagctatagcttaatttccttattccccttaatggcaaaagagttgtccagactcatcatatccacttcctctccccactttctctctgcaacccactccactcagaattacctccccactgctccaccaaagactttgtcaaggcccccagtgaccttgacattaccaaactccaatgatcagttcttagatctcatcctgctgaacttttcaacagctttggacatcacggattactccctttttgttctttatttgcctttaccattttaaccatttgctttctgttgtaaactgtaaactctttagttataggatagagccatcaaaatcttatctggctgcttcattttataaaaagaatattttaacatcttacttaaactcaactttcattttcatgtctattgctatcaaatttccttatgatgtaaataaaatcttatcctttaggtcagtgcttaggaattgtttggaaaattcgggattaactgtggaaaccaggtttttggagtacctattcccctgtctcctacttcatcattatatattaatcgtctgaaatttctcacctatattttttttttgccttgtaattttcacattttctcttattaattttgcctttttgatgtagaggctactccttcgtcttaaatttttctgactattcccacttctttctctagcgcatctgctttcagatgtctttaattcttcttgtgatctttaatttgagacttctttgacaagttttttatatatagtctcctacttttacaatgtttttcttcttcccagccagcttaccccactgttctttggtgatattttcacttattttagttttgcctaagtctgaggaggatggcccaagttgattcttatattctctttgtgtatttaaatcttatctcttctttttagtggcagcttgtaaaacctatttttgtctttaaagtttaaaaacctgacaagtaggcatggttcttatttccttctcaaccaaggtacttgaaagtgcagcacgctgcctccacttcttcacttccatttcgttctaggttttttgcaatctgtttttttttcctgtcatatctaataaaactgctctcaggaaattcactcatggctttctttctattgtccctttcagtacttgtcttactgaactccctccttcctgaagctcccgactcttagattccatgatgccattttctctagactttcctctttttctttctggactaatttatgggtctcttttcttctgcttgttctttaacccttactctcctccagggctctgtttttatttctccattcttctcactatgcctaatcttcttgcgggagcttatccactcactagcccctctgactttgtgctatttcgtgtacctggaattcttccctttcttgctctccccactcatttttcaaaacccatttagctattactccctccaggaaggttttcttcagtccttaggttggactgtctcctctgtttgccccttgagtacactggttgacaccattgtcatatcacacattatgtggtaataaaaattatctgcagtcttcttaaggacagaaaccatgactatttttgtatccctgcacctagtacagaactcaagaggttgtttttgaggcttgctttcctctgaatgatatgtaatcctcttcatcatctaactgagattgtatttcagctcaagaaaaagttttaaaaattatgctctggatcacactttctgtagtatctctgatatacatgtcatttgcatatcaaatccccttgatctgcttcctagtcctatccaagccactatcatatatttatgaagtctctctgtgggttaacttcaaccatcacttacgtgctaatgattccaaaatccttttctgtagcccctaccactgtcctgaactccagattattcctgcacatcctatcccattgcttgcaatcatttcttgtcctcatggcacagagattctgctgccttgaggcctccaacccccaagacaggtcctttaggatcgatgaggactgggtactcccaaatccctcatttgaatataatgtgtaggttgtcagggaagagcaaagttgggtggaggtgaggtcagcatggaaaggcagttgcaggatgagaggtagttgtatcagtttcctattgctgctgtaacaaatcaccacaaacttagaggcttcaaacagcacagacttattctcttgcagttctggaggtcaaaagtctgaaatcagtcttactgggctaaaatgaaggtggcagggctggtttcttctggaggctctcaagggagaattcatttcctggcctttgtcagcttctagaggctgctggcatgcctcagctcctggctgcatcctgccaatctccgcttccatcatcccagtgctttctcccctgactctgatggctcctgactcgggaacattgtgattacagtgggtgctttcagataatctctccatctcaagatccttaacttaatcacatctgcaatgtcccttttctcctacaaggtaacattgacagattctggggactaggacatggacatatttgaaaggccattattcagcctacaacagcgatcctaggttagggtagaccatgatcctaggtcagggtagaaacacaagcaaactacttttagcaaaaggagatccagaatatttgatttttagcaggtatgtgtatatgtgcatatgtgtgcatccgggaagaaaaattgttgctatcaatgctatttctaggtaatagaaaacaaacaatgtgaaggggaaaaattctaaattttgtgtgtgtgtgtaaaagtaataaactttaaagtcatttatctgaactgcctataatttatatatacttgacagcaaaataatattctctagctaactaacttgttagattgttgtcatttaagtttgttttattacagtgtgctcaggagtcttttccccaccttaacaaagcagggggctttgttcagtgctcagtacctctaatgagctctccttttaatggagatgtgaggcagctgggtttaaggactctgcgcaaaggaagagaagaatgattagaccttgcttctttcttttttttctctcgtgtactcttgtattcttttctttaaagaaagctgtggttaagggaaataattggctaagggaaaaaaatggaaagaaagtccttcatttgcacagcttgccttggccatataaaagacacacaccctgaagcagaagtgctgctgaaacaggcagggggaatggaaagggttattgggagatggcttagtttggtttccccaggaagcagatttttaataatgaatttgggtaggcgaatggggatgtgattattttgggggacatgcagaatgtctcccagagttgtatctgggggttaggaggtgggtatttatccatcagttaccactcagcattggctgaggactgtcctcaggggctttactcctctgctgcctggctgcatctgtggactgcaagtccctgtggcaggggagggggcctggaggctgaaagacagaacatgccctggacacaactggcagagcactgtcagccctagagaagcctgcactcacctcgatctgccttccaactgccactgaaaacagaggggtaggtgggatgtagcttagggagctcaaggtgagggctacagaagaatcccttctctaatggtaggtagtgtggcaatgatgggctgtgatggccacctgcttctgaagggaaagatgacaagtgctcctaagggcctgggctatgagtaagacagatatgggctcctaagggcctgggctatgagtgagacaccccattaatacatttgctccctagccaagcctctgtttttccatatgtaaaatgagaacaacagcatctcctttttaggactgctttgtgaaataaaagagataatgtgtatagagtgctttgcagggccactgggacaggactacacccatacatgagagtagttgtgttaaaaggaaaatgaaaaggacagcaaaagcaaaacaaaccaaaaccaaacccaaacaaacaaagaaaatacgagaaaggaaaagaaacaggaaaaaaaaaaggaaggtgattgacacttgagacatctgttataggaaatatgtcgcctgtgttcatatttctttctaaatgatgtctgcaactatttcagggctcaggacatggagtcatgcacacgttttacttgagtgtccagtccaggcttctttctgctctgccaactctgtgtccttggtattgccttggtagaatttgtggcatcagatacacagtatatctgatgttgttaacagggttattttagggccaccagtatgtcctcaccagccttgtgaaaaaggccagacatttgtctattggaggagccttggtttcttgctcaaatgaatgataagtgaactgcctcagatcattaaccatgttcttttgtaaagtccaaatcaccatttggcagcaaatggctttttcacctggggtggatgtttgcttgttccctgcttcttggaacccagataatgagtacttaattcactataggcttggtgaccccaaggcccataaagaaagtcaatggagtggtccacgctggcggacatcaggcttagtgacaccagggacagtggtgctggtgacacagctttcgcctctgcttatatggtactgataaggagcttctagttcagaaagcagaatcactagcaaacccctccaaaaaaggaattgtataagccttgccatagaaacaaataacaactcacagactagcaatgccacaacttccctggaatagaaaaggtcaaggtaatgacccaggcacttgatgtgctggctgcagaggaacacactcccccacaactttcacacactcacttcatgctggcaaaggattggtttgaatgctgctatctggattgctatctctgggaagtattttagagccaagaccccatacaattccagtgggatgaatgttgcttactcattctgctgcagtttccattgtgtgcgctctgtgttgatgggttgtgtggaacaggagatgtgagctctcctaatttattaaactgggagcataggccttctcctgcttgccatttagggtgacgagggaggaagaggaccctgtggtcaaggagctggaggagggaaaagtgctgcgccggaggcactgtgagctcaggagctcaaggcaccctggcattgagctcacatagccacatttttataaaattttcaaaataaagagattttgcctatgattggttaagatcattgtctcttcctgtaggacttacccttaccctctgtagcattgatcagcagggagatggcgttggagtagccagaggcattttgggaatcagactaaagggaagctgaattggggatacattttgtttgggtttaatgagatatatttatgtaatttacagtcacttccatgtatacatgcatctggtagttaataaaaatatgttatttttctggattattgtgatgctaagctattctttagtttttaaaatttataatttttgtaattttctcattttaaaaaatactcatatttgtatctaattttgtaagcataatttttatatatttttgttttttattttttgagatggagtctcactctgtcacccaggctggagtgcagtggtgtgatcttggctcactgtaacctccatctcccaggctcaagtgattcttctgcctcagcctcctgagcagttgggattacaggcacccatcaccacactgggcgatgtggttgtatttttgtatttttagtagagatggggttttaccatgttggtcaggctggtctcgaacacctgacctcaagtgatctgcctgcctaggcctcccaaagtactggaattacaggccataatttgtatttttaataaagaggtctgtatttgtataagctcagaccccacaaacctggatctgccctctcatccccctccctccctgcctccttccctccctccctccttcctttccttccttcctccctccctccctgcctccttccttccctccctcctttccttccttcctccctccctccctgcctccttccttccctccctccttcccttccttcctccctcccccctcccctttcctttccctccctccctcccccctccctccttcccttccctttcctttccctccctcccttccttccttcttttcttccttcctccctccctccctcctttccttccttccttcctccctcccttcctccctccctccctccatgcctccctccctcctcccttccctcctcccttccattccctttccttcctccctcccttccttccttgcttgcttccttccttccttcctttcttcctccctccctccctccctccctccctccatcccttcctccatcccttcctcctcctcctcctcctcctccttcttccccttctttaggggctagaactttgcaatattcacctgggttcttgatttcttgctcctgttcacattctcagaatcgaggggaaaacattttatgtatatgatggattaaataagattttacagaatgatttgacagcccgactatcacataatatgggaatacccacaaaagagtgtgtcctgagttctgagctgcccacttggaaggccttctggataacactgtctctacctgatctggcctcccctcaccattcaggctcacccctcgcctcccctgacaccctgcacgcctccctttcaagtcagtcctcccagtacacaatatattttacagcacagtgtttttgtatctaatactgttgactcagcttctctttattcatctttcactacaaatgctaataaatgcaaaatgctaaatcatcaggtttctcaatctaaactaaagaacaactagagcattaacgtttagagaaaagttgcaagaggcaaccacactgaaagttgtaagaagtcctgaaaatgaataaacaggagatcaataaaggaaaaaactcctgaaagttaatgaagagaaaggaaaaaaataaaacacagaaaacttaaaaaaaaaaaaaagtgtccatagcctgagcccatttgatttagaggcgagcaggtatttgcacttcagagtacctgagggcagcatcatggaatctctgatgttcataatggttaatgtgtggagttggtatataaaaggcaaaaagttgaaaaattatcatccaaagaggtgtatgttttaaaggtttcattttaacaggatctctgtggtccaagaggcttacttctgtagcatacattatttttgagtaatattagtcaaacaagatggtattgtactaaatggaattaggggaaagtacagcataatagttaagactaaatatggagtgggacaagcctggccataaatcctagttcttctaccgggttagctgtgggaacttttcaagcttcattttcctagaagatgagcatcataatctctacatcgcgcgatcattgagagattggacaatcttaattagttatttaattaagttctgttaaggatttataatacagttgctgtgtgaggcttttttgcaggatcatttttcagttagttcccagcttgtcattcaaattgcagtcctgacagatttccaatgttgcaagagtttagcacttcatcagtcatttaggcattaaatagacatgaaaatatttgttaaaatattttctcttctgttatttttaggttttttaaaaatatgttttccctgagagtaataggagaacaggttgcactgagaatgaaatccacattccacccaggccctgactttggcttgggtttgggctctcccctgtggtctgagcagctgaagtctgggattggatgccccaccaaagccacacggagctgggaggacacttccacaaggacaggacactgggtagacacaactgcctgaatttcatagacccattggaaggagctccttgcaatcttctctagcctaatttttccacttcttgcctcagtgggcctcatctcatgccactttcttctgtacccactgcgcggatgtcggaccgtgccacaccctttcccatctctgggcctttgcacgggctgttccctctgcttagattgctcttccctgactcttggcgaggttggctcctccttacccttcactcctgcacttagcagatccttgctcagacaccttcatcacacgcagacccttctctgctacgctgcatctcaggtctgacttctctgctgcagctccctgacaacagtgcaggcttgttgtatggatatgtttgtttacttgtattccatccgtccccccatctagactgtacgctccaccagatcggggactttgctcttctgttggtgggacactcctggtgcctggcacagaggctgacacattcaggccctgagatgttttctgaatgactgataatgaatgaataataaactggtgaagaggtaaaatgaggtgggaggaggtgtgagggtgggtgatggaggatggcaaggtgaggatcatgctagtgggtaaataaacttgctgggatctggtccctggtgggaagtgactgcaaaccagcaatactcagagtgaaggaggaagccacgggagaacagggccagtgtctgttaattgaagagagactctggggccacttgtttcaggcatctgttttagctcttctcaataggacagtgatgttctaatttctttgtatggtataggaacaaaaaataataacccataacacaattcagaacatgagaaaagcattcctggaaagtggccacagaaactactgccacttcccttaacgccacttattccctagggagacccaccacctccttatccctaaccctaaccctacctggccatgatacaagtggcatttctagttgtttatgacatgctaacacttgtgtttcccaggggttcagtgagcctaagtggggagaagagtggggggaaattgttaagactgtggtctttgaagctgagtgctggctctgccacctggtagatcgtcagcttggacatattatttaacttatttaagttaagttaaagaggttaaatttttagacttatttaaaacggaaatagtcactaatagagatggttctgaagattaaattggataactcatataaagagcttagctcagtacctgtacatggttagtgtcaaataaaaatttattcctgagtccttccaagccacaattatcttctaatcagcccctgtggttgtagaaagcttagcatgtaatcaacagaaataaactgagactactggagccagaaaagaaaagtttattggaaggctattaatagcttaaagaactgagggaagagctgaccaaacaggcctcgggaaagttgagaaccaagggaactggggggtcccagaagcaggaattcatgagccatctttccaaggtcctgccgctgctgatggctctgctgctggtgttcttgttcttgttggctgcagatttaaatgcccaggagggagaatcagacagactgcagtgggctggggctctcccctgtggtcagaggagttgaagtctgggattggttgccccaccaaagccacatggagctgggaagacagttccacaaggacgggacaccgggtagacacaactgcctggattccatagacccattgcaggggactcctgaggacctgcccagtgaacgtctcttgcctgatttttcagcttcttacttatcaacatttaattgcctttaatcatagcccaccatcatttcctcctgtctttccagacaatcaatcattccttcttttgaatgatgtctataatgttgattcactcatgcattcatttagtcaaatgctgtgtgaagcttcttttataggaacatatttattacatatttattgagcacctattaggtatggggttctgttctaggggctggtttagctcaatgactcaaagaaatcccatgccctcaaggacatcattggcaccattgccacttgatgttatatatgtatttaacatataaataatgtgtctgtgagacagccataaataaataaataaatacataacccgaagtggcaatggtgctaatgagccaagtgctaatgagagggggaatgagtgtagaatgtgagggggtattgctcacactggttattcatgtttatatgtgtctatccttcaactgatcccgttttattactatatttttacttgtctgccataaatcactagctggcttctgccttctgaagtgagcaccttaaagtaccctacccctgcctcttggtggatgctgaataaatgtttgttcaatgaatggataaatacaccccttatagtctggctgtcagatgtctgtatttttctgcatgtgaggcacccagccactcttccaaggggagcatcgcaggtgacatggacagaagggagaattatgcctggctctgccctcttggatactctataatgtttttggctggctgattgacttaaccctcatttagccaatctctcttctctggaatgaggttggtttctttgtgttatttttttttcttttgtcatacatgctttctgaatttaaaaccaactctgagatataaatgaggaaaatattcatccctcacaactgaagtcacagaatcaacatcggaatgaatcacagcatctgaaggaacctcaggagaacggcaataacaaaggtcctttaagggaagcctgaatcctcttaaatctatatttaatgtctatgtttatgaaaatggaaagaactagatgaatccttatttaaagactcaatctaaaagtagacaacaagacaatggaatgctttaaaatattttttcgacatttgtgtaaaatggagcagtgtggattgcatgctgttcagacatggcctccatcttagcaagatctctggtttttcactgcagaccaacaaatgacggccattgacacagctctctggtcccgatggtagctgtgtttataaatggtcagctgtgttgtgtgtatatttagcttatgctaagtgcccctgagaggatgaatatgatctgtttccagtttagttatgatttggaacatggtagattttttccagatgaatatatactaagccttttccacttcctgaggaaagttagggttggattctgaactgcaaattgccaaacttgttaaatcgaattaaaaccaaatgtaaagtgctgttgactctatttacaagcacttgtcggaatatactgtgccgctcaatgaaaatgccatgttttgagtgaaagattagataccagtgctgacagaccagaaaccatttcattcaccattagcgtgaatggatgatatggctgactgataggatggttagaaataatggctaaatggtattggtgactatatagtatctttatataatattaaaacttttcaaagccatttttatctaaatgttctcagagtttcatatctccaaggatgcaagaatacacatgatggtaaagatgggaacaatagaccctggggatcaatggatggggaaagaagttgggaggcctaggctgaagaactgcctattgggtactctgcttatggcctggatgatgggattgttgggactccaagcctcagcatcacacaatttacccatgtagcaaatctgcacatgtatcctttaatctataatacaagttgaaataaaaaagaaactatctttctaataacattatcagccctgataaatatgttaataaaggtttaaaatagtcaagctcaaatattccatgttacatattctatttgaaacaaaggaaaaaatgggatgctagtcaatacctttaataatgcaaatagaaccccagcactaaatataagagaaagaacttatttttaaacatttaattatgtacaaagtccctttaaaaaaaccttgaaattaaaccaaaatatataaagtattgtaaccattatcactattacaaaaggattctctccaggctactgagaaagcaaattcggccagctacatttatttgttttttcataagccatacatttcttgatagagatcttaaaggaaaagttaggaccaacttgacatagatgtcagaactggaagggacttgacaacaattacacatcattttctgcgtatagagagctagtgatagtgagtgactgctccaaggtcacttatctgctaataagtggccaaggtggggttagaccctagacttccatttctgtgctctttctatcttacctccttgcctcctgggagtgagatagattagcaagataaatttgtagttgtcttagtcttttcatgctgctataacaaaatactcacaagtgggtaatttataaagtacagaaatttatttcttgcagttctggaggctggaaagtccaagatcaagatgccagcaaatgtgtctggtgagggctgctgtctgcctccaacatggtgcttcttcttgtgtcctcacttggtgaaagggacaaaaggacaaaaagggccaaatgctatgtgaagccctcttttataggagccttaattccattcatgagggatgagccctcatgatgtaatcaaccccttaaagccccacctttaatactacagtagtccccccttgtccatagtttcactttcctaggtacagttacaataagatattttgagagagagagaaatagagaccacattcatgtgatttttaatacagtatagtgttacagttattctattttattattggttgtggttaatctcttactgtgtgtaatttctaaattaaaccttatcataggtatgtatgtatagaagaaaaacatagtatatatagaaaacatagtatgtatcaaattcagtactatttgaggttttaggcatccacttggggttcttggaatgtatattccctgtggataatagggcacaactgtattgtactggagatactacgtttcaacacaaattctgtaaagacacaaaaattcaagccatggcagcaatctgtagaatggttttgtttacatatatattttaatgaaagcagctattatatgaagaatgaaatatatactctgttgttattattcttgtgctcctacatgttcctgctctttcaatcccattttcactattttctcattaattgctgggaacaaataggtaagataggatgtgtttcaatgtgcttctgtgagcaggtcaatgaaacgtgtccaataatgtagaaaatagacagaattcttcttctcttggtctcacccagttgtcttacacatcaccaagtagcttggtatttaatgggctgtccattctgatgctacagaaatctgtcagggttctatcataggtcagctctagtcactgctcatttatttatcttgtcatttaaccaagcactttttttttttcatgaagcatcatcatttccagagacaccatttttttttttcagtaaaatctcaaagtctaaaattgagttaattatattttaaatcataaaacactttaaattcactttaacatgttttcacatcttagaggctgaggcaggagaattgcttgaaccccagaggtggaggttacagtgagctgagattgtgccactgcattccagcctgggcaatagagggagactgtctcaaaaaaaaaaaaatgtacttttcaagttgtatcatgtttgggtgtcaaaaatataactttgagatgaaggaatatacataaaaattatttcacagattttttctcagttaaaaaatcatacttggaaagattacattttattaaaccaaacatcttctatagtatctatattattaaaatgtacaggttattataagtaaggaaaaaattaagaatctgtcttagataagaattcttagattgttggaactagaaataaattaatagctataatttgtggaacattccaaggttcaatagcttgcatgaagtccttaccactgacatataccacttctagtctatgtttaaagggacacctttactaactctttggtaaagtcctgatttctgctttaacagtattcaattctccattaagtgcttagaggaatatgagtccttggtgtattgactgaggtgcattttgtagttattggtacatcaccaaatatacagaaattggtagttacgtctttttctaatgttttcctaacatgtcagttgggataccttttcttcttttattattataattaattttttaataaaaaaggattttagaaatccaaacaattgcatatttattgatattttattcctaataaaagtgatactttgatatttaagaattcaataatataatttgagatttttttttttttttacacatttctgaaaagggctttggtcctcttaatagctttgaaattgtacttgacagactaattagattgtttagactggcactctcagaggtacttaaatgcactttttatgtcagacacaaaatctgagagactactccttccttgtgcccattagtaatgggatctaatagataacacccacttccttgaagccttctcaatcggacatgctgagttagtcctttcgcaggctaactaatcattcagttcttttgataccctccttccctatgagtctaaccaatataatattcctatttattgactcattttatcgtaatttcctattgtcacattacatggactgcgtcagttagttccttttttccaacttttattttagattcagtgggtatatgtgcaggtctgttacctggtatattgcatgatgctgaggttcggggtatcagtgattctgtcacccaggtactgaacatagtacccaatggttagtccttcaactcttcccccatttctccctctctcctctagtagtccctgctgtctgttgttcccatttttatgtccatgtgtaccaatgtttagctcccacttataagtgagaacatgtgatatttggttttctgctcctgtattaattcacttagaataatggactccagctgtatccatgttgctgcaaagaacatgatttcattcttttttatgactgcatagtattctatggtatatatgtaccacatatgttttaatctaattcaccattgatgggcacctaggttgattccatgtctttgctattgtgaatactgttgtgatgaatatgtgacttcatgtgtctttttggtagaatgatttattttcttttgaatatatactcagtaatgggattgctaggtaaaatggtagttctgttttaagaactttcttaaagtttttaattcttaaagaatatttctttgagaaatctccaaactgttttctttttttcccccttgagacaaggtctcactgtttcactcgggctggagtgcagtggcacaatcatgtctcactatagcctggacctcctgggctcaagtgatcttcccacttcagcctcccaaatagttgggactacaggcatgcaccaccacactcagctaatttttgtattttttgtagaggtggagttttgccatgttgttcaggctggtcttgaattcctgggctcaagtaatctgcccactttggcctcccgaagtgctggggctacaggcatgagccaccacgcccagccccaaactgcttttctatgggggttgaactaatctatattcccaccaacagtgtgtaagcattcccttttctttgtagcctcaccagcatcttttgttttttgacttcttaataatagccattctaactggtgtgagatggtatcccattgtggttttgatttgcatttctctgataactggtgatttgaagcatatgaagcatttttgcatgtttgttggctgcttgtagttttcttttgggacatgtctgttcacattttttgcctttttgtttttttttttcttttgcttgcctgctgagtttaagctccttatagattctggatattagagctttgttggatgcatagtttgcaaatattttcttccattctgtagattgtctgtttactctgttgatagtttcttttgctgtgcagaagctctttagtttaattagttcttatttgtcagtttttgtttttgttgcaattgcttttgagggcctagtcataaattcatttccaaggctaatgtccagaatggtgttttctaggttttcttctaggattcttatagtttgaggtcttacatctaaatctttaatccatcttgagttaatttttttatgtgatgaaaggtaggggtacagtttcattcttttgcatgtggctagccagctatctgagcaccattttttgaataggaagtcctttccccgatgcttctttttgttgactttgttgaagatcagatagctgtaggtgtgcagctttatttctgtgttctctattctgttccattggtttatgtgcctgtttttgcactagtaccatgctgttttggtgactatagccatatagtatagtttgaagtcagataacgtgatgcctccagctttgttctttttgcttaggattgctttggctatttgggttcctttttggttctatataaattttagaattatagaatttggttctatatgaatttcatttatcgttctgtgaaaaatgatgttggtagtttgataggaatagcatcgaatctctagattgcttcgggtaatatggccaatgtaacaacattgatcctcctaattcatgagcatggaatgttttaacatttgtttgtgtcacctctgatatcttttggcaatgtcttgtagttttccttgtagagatctttcacttccttggttagatgttttcctaggtatctgtgtgtgtgtgtgtgtgtgtgtgtgtgtgtgtggctattgtaaatgggattgtgttcttgatttggccctcagcttgaacattgttagtgtatagaaatgtgactgattttttacattgattttgtatcctaaaactttactgaagaagtttatcagttgcaggagcctttggacagagtctttagggttttctaggtatagaatcatattctctgtgaagagatatagtttgatttcttcttttcctattcggatgccttttagttctttctcttgcctgattgctctggctaggacttccagtattattaatagattgaataggagtggtgagagtgggcatacttgtctttttccagttctcaagggtaaggcttttagtttttgccccttcagtatgatattcgctgtgggtttaccatagatggctcttaatattttgaggtatgttctttcaatgcctagtttcttgaggggttttatcatgaagagatgttggattttatcaaaaactttttgtgtttatcaagatgatcatatggtttttgcttttaattgtgtttatgtggtgactcaaatttattgatttgcatgtgttgaatgaaccttacaccttaggaatgaagcctacttgatcatggtgaattaactttttgatgtgctgttggatttagtttgctagtattttgttaaggatttttgcttctgtgtttatcagagatattagccggtagttttcttttttggttgttgtgtctttgccaggttttggtatcagagtgatgctggctttgtagaatgagttagggaggagttctttctcctcgattatttggaatagtttcaataaaattggtaccagctcttctttgtacatctgctagaatttggctgtgaatccatctagtcctgaggtttttttgataggtagggtttttaaaaaattattgcttcaagttcaaaacttgatattggtctgctaagggtttcaagttccttctaattcagccttaggaagttgtgtgtttccaggaatttacccattttctctaaattttctagttagtatgcatagaattgttcataatagtctctgaggatcttttgtatttctgtgggattcattgtaatatcacctttgtcatttgtgattgtgcttatttgtatctttttttttgttaatctagctaatggtctatcaatcttgtttatcctttcaaagaaccaacttttagttttgttgcttcttcgtatgaatttttgggtctcaactttgttcatttctgctctgattttatttattttcttctgctagatttggggttactttgctcttgtttttctagatcctctaggtttgatgttagatttctaatttgagatctttttaaattttggaggtaggtgtttagtgctataactttgctctgcttttgcagaatcccagagatgttgatgtgttgaatctctgttttcatttatttcaaagaatttcttgatttctgccctaattttattgtttactgaaagccactcagaaacaagttgttaaattttcatgtaattttgcaattttgagagatcttggagtttatttctatttttattgcactataatctgagagtatggttggtatgattttgatatttttaaatttattgagacttgctttacagttgagcatgtggttaatcttagagtatgtttcatgtgcagatgagaagaaggtatattctatacttgatggatggagtattctatagatgtctgttagttctcattggtcaagtgtcaaatttaagtccagatattctttattagttttctgccttgatgatctgacaatggggtgttaaagttcccttctattattgtgtggctgtgtgagtctttttgtaggtctagaagtacttgttttatgaatctgggtgctctgatgttgggtgcatatatatttaggatagttaagtcttcttgtttaattgaactttttatcattacataatgctcttctttgtccttttttactgttattggtgttaaaaatctgttttatcagataaaagaacagcaactcctgctttttttgttttgttttctgtttccatggtagatctttcttccaccctttactttgagcctatgggtctcttgaagacagcagacaattggacttcattcttttatccaacttgctactctctgccttttaagtgggaacattgaaaccacttgcattcaagtaatagtgatatgtaaggttttgatcctatcataagttgttagctgtttgctttgtagtttctattttgtagttgttttatagagtctgtgggctatgtacttaacagtgcttttgtggtagcaagtatcattcttttgtttccatgtttagaactttcttaaagatctctcataaggctggtctagtggtaatgaattcccttagcacttgcttgtctggaaaatattttatttaaccttcttttatgaagcttaatttggtgggatagttcttttttgaatatccctaaactttgatacatctggaaggcagctcatctggtgcttgctctgaactgaaaatgaaggcccacattcttgagtattccttcacttaactctcatatcctcttccaaggagatataaatattaaccagaagtccattccaggtttcccattgtttcagtctctgctttcttttctcagggagtccattttgctgaacctcacctccaccccaacctgcactctcttttccaaaacatattattaacaagtagtaaatcatgtcatgggatgtcagtctcccagtgttctgctgttaaaataggtgggataatgacctcaggacaaagattcctttaagatatttgcatttaccattattgttttgcatgttttctttcagattatctcaactttggtctcctgggaccactcgttgctgacagtcagaaagtaagtgtatatttaaaatgttcttcttagctataaatggaaatctcagttttgttcagtagttttcacaagagacagttctgttcaaatgttttatcaagaatagtagcataatgaatgggagttttgtatatataaaagatactaaagcccatttaaaaaatttatggaaatgataaataaatagaaatgaagtaaataaggtactgcctgcttatcacctttgaatattacttacagcataataaagtatatttgcaaccactcagtggagtagtttttatatgacatcttcatcccaggcagctgccagagtcttctcaaggggtacattacaacagcatcctcctttatgttaaattgggtcatattccaagaggtatctcaaatggcattaagcaccaattaacagatatcagatagtctggcacctaatgggcacataacagatttgtattagagaatgaacgtgtgggtgaattaattcatcaatttgtgtggcagctctgcaaggtcctcaccactgcaaggcaatgtaggagttagctccaaatctaactccaatgtggttagctccaaatatggatccagatacttgggttcaattttggctctgttagttactatctgggtgactatggaacacatccaaatatctgtttcttgttttttttgtccataaaatgggactaataccatattttgttgttatgagattattacaaggattaaatgagttaatattttcaaagtgcttaaaagagtgactggcacatggtaatcactgcaaaaatgtttgtcaaataaattaaaataaattaagaatacagggacattccaagatcccatatttagagattgagaaactggtttggtctggaagcaaacaatacatacctgtttcccagatcttggtttctaatactgttttccaatgaaatgaaccagggttccttggagaaatgactgatttaagactgtggcagcaaatatacaagatgagcctggagcatcttgtagtgctataaagtaaagaagtgcaaaaaataaaaatccgcaatgatggttgtatgtgaaaagaatacaggacccaatcgaaagtactttcaatgtccaaagatggaaaatttgagcaaagaaaggaagttagaattaggatatcacttaaagtacaaaatacatatctatactgatataaatacatgatgaataaataaatgaagagaatgtagaagaattccaaataatgtatgtaagatactctgcctttcagggggtaaagcataaccctccctgggggctgcacagaatgactttctttcaaagagtatagtaaagaaagggaggggaaaaagtaacttcacaatggagaaacccaagcaaacactatctcaagccaggtgattaaggttaaatcagcagtggcaggtcacattggtagtaggtacccttgacatgatgtgatgagaagggcactttgcctttgtaatcttcctccccaaaatacttgatctaagtctaattatgagaaaagcataagacaaattccagtagagcgacatgctacaaaatatctgactagtacccctcaaagctgtgaaggtcatcagaaacaactcaagtctgagagatagtcacaatcaagagaagcctaaggagacatgatgactcaatgtaatgtgggatcctggaccaaaaataggatgttaggtaaaaactaagaaagtttgattaaagtatggagtttagttcacaataatgtatcaacattggttcatcaaatgtgataaatgtaccatgctaatgtaagatgttaatatttgggaaaactgggtatggggtatacaagaactttctgtattatctttataatcctgtaaatctaaaactttgaaaataaaccatttatttgaaaaacagttaagtaggccaggcgcagtgtctcactcctgtaatcctagcactttgggaggccaaggcaggcagatcacgtgaggttgggagtttgagaccagcctggccaacatggagaagccccatctctactaaaaatacaaaattagctgggcgtggtggtgcatgcctgtaatcccagctactcaggaggctaaggcaggagagttgcttgaatccaggaggcggaggttgtggtgagccgagattgtgcccttgcactccagcctgggcaacaagagcgaaactctgtcccaaaacaagcaaaacaaaacagttaagtagacacaccaaaaccaaaaacaacaaaaatgaaaacaaacaaaaaaactggtttggaggtataccttccaatttttaagtaacaaaataaaagaattttgatattttgaaaaatgttgagtctgattcatttgtgtttcaagactcactcatggagaatgattttctgcattcaagttttgaattggataaaggtatacacatgtataaagcattctgctagatttctgttatcctcaacagccaaaagaaaataataattggcaaatcagagctttttttcaagaatggctgttatttgagttcaaagtggattatgacatgtgttagttatgtattgctacataacaaattgccacaaatatagtgacttaaaacaatgagtattgtgttccatcttcttgggtcaggagtctgagtacagcttgggcctctgcttatggtcttggaaaggtgtcatcaagatcttgactgtgctgtgttcttgtctggagcttgagttttttcttctaagctcatgcagttgttggcagaatccagctgagattgtaggactgaggtccccactttatttctggaagtcacctgggtcactctcatgtcctaggaatcacccacagcttcttcccatgtggcatctcacaggcttgtcacaacatggcagcttatgccttcaacgtctgcaggagaaactcccattgcagcctgctaagacatcaaggtagtgaaatattcaatgaaggcattggctttgccatatttcgtttgctgaaaatcaagtcacaggtcgtgcctgcactctgtgggaggggattacataggacatgactcagtggggatcacctgagggtgtgtcctctacaataggagaattacaaaacagatgcaagtggctgggcattgggattccaccacagatgagcaaactaaagtaaaggcaaatcagaaatgcttgcttcttgctttcaagcaaactatagcacgaggtaaataaataggtttcacctcttgcccccaacaaagttgttaaaaaatactcctaaatactcctcaaagttatcaagtgagaattaggattatctgaagatggaggagtcagagaaaaagatttggagactgctcataaatacatcatcatttccctgactaatactttctcttttttagtgaggaaatttgcacaaaaatatgttctcaactccatagcaacaatgtctgtacaccttaataactcattttataaaagttcaaataacatgatctcattttcaacttttcatgacttaatttttttttcatttttcaggcttagtttttttaatgcttgtgttttaaaattctgcctgccaataattattaatacagtgatactgtttagtttttttatattttacatgatgtttgtaaattttatattttaaatgtattcaatatttattttcactaattttatgagttctgaatccttttcttataaaatatgaattacaaaaatactggcatggccgttttgctccagcattgtaatcaccacccagatttttaggacctcaaaaatgtatatttttcctgattgttctttataacactaaactgtctagaaacccttatatttaggtatctgaagtgtatttgcaaagtttctgcttgcatctggaaataaagcacaagatcccttattagaccttgtgtctaactgtgggtttggatcatgtcatcattgtgtctatgaatatccacagaggttactacaaacctcttaggggaccgaaacagaaacctttgctatttatgtctcagacatgcagccaccatgaagaaagcaggtaattcgtggaaacgcagctcattagtagccaagatgaaatgaaaaggaaatatatattgcagtaatttaattaagaaactcacaagaggggctgggcatggtggttcatacctgtaatcccagcgctttgggaggccgaggtggcagatcacttgtggtcaggagttcgagaccagcctggccaacatggcgaaaccccatctctactgaaaatacaaaaattcgccgggcatggtggtgtctgcctgcagtctcaggtactagggagcctgaagtgggaggatcacttgaatccaggaggcagaggttgcagtgagccgagatcgcgccattgcactccaacctgggcgacagagtgagactctgtctcaaaaaaaaaaaaaagaaaagaaaaaaaagaaaagagaaattcataagaggaaggatttcctgtggcccccttctccttctccccccttctcctcttttttttttcaagtctctacatgcctatatttttcttttctctactcattcacaataagccttaggctgtagctactggttcctcttatgccaaggggtacaaagaattgttattcagcattgtgagaacaggatcacctgtactattggtaaaataactcatttagcagataaaggtcagagcttacctgcttccttctttcctccttggggttgttttctttgtaggaattaaataaaggggtcttttttgaaaataggaagtagattagagtaaatagaagtaacctttcctgtttgtgaaggaggcattcagtgaaagctcagagcaagtgcatttatctttagctggaaggtcatagagcaaagtgattgttgatcagggctaaattcttaggaaagtcttaggatttctcagggtcgttgccctgtggtggtcttcagagctctttctcatggttttaactgagcttcaccagggatttaggtttgcctagtggttttatcagatatatttgccatgtaccttaatatagaaatctggtacactcaccttttaccaaaattctggatctatttattatgggaatagaacaaccactagatctttttgtcaaaagagctgggtttattttgaagtaatgcattttataaatagtatctttgtacattatatctgtctttccattttgtttctagatcatcctaacatcctttctgtattacggtgattaaatccacattggatttccttattagggagtacctaggtagcacgtggctgtggcagtctgggaagacagacattcaccaactcatttgttatttctctttatttggtactattcttggggccctgtgtccccaaaattacctcctctcattctgagctctccttttctggcgacctcagcactcaatgcccacctgccaccatccctcatacctcctcctctcatgtcggatcaaaacactgtttcctcaagtcaaataaaaacttacataccttccatttgccctgcccagtgctcagggccacagagatggggccagcaaaacaaaacttccacacctgtcctagaacctcccatcctcttcttgggaccacttttcccatctcagaggtccctagctcctttctgggcatttctcctgtgtctcattctctgacatctttatcctcactgaggtctcagtgtaggattgcccctcctagggcaatcatgttctaagagagcgatcctgaagactagaaagacttcacacccaaaataatgcactcccaatggtgaaattctaggcaccatgataggcaatagtggagacatttttaacccatccttgtccagcctcccttaaatcacatcacataggtagatgcatacgttgcttgctatgggtctaccctgtctaggaactattaaaaaacggaaatgtcaatctctgttcttaaggtgtaaataaccttaaggggcgttacattaaacatgcccatggagaaagatgaatgtactgtttaagaggtgttctaatcacataatcctgggttctcacctcagtttctctatactagctgtttagccttgggcaagtttctgaacttttcagaagtttctgaaaatttcagaggctcattttctttattaataacactgggataacaaagcctattctgaggtggttatgaaaattcaatgagataattatatgagatagtatatgagataatttatgcaattcttggcatatagtaaatagcatgacacttgcgccatcagtaagcttgaagaaggcagtgtggaagtctgaggctgagaacaggagtgtggagcaaggcagtgatgaaggtggaggaggctgaagggcttcacaggagggcatttctttgcttcatgggaagcactgagtgttgtccaatatctgtacctgcacagggtggatacttcatcctttgatcaattcttggaagcaacctgctgaggagtgctgaaaagtatgagtggaacctgtcaaaagacaaaattacaacaaatgtggtcgaaaaattgaattggcttttatttgtaattttagactcaggcaccatctcattctataaaatagaatgggtgctctgatgggctcaacaagagggggcttataggcagtaaaaggctgaagaaagcagaaacagggaacaaaaagcagatcagtcatttcaaagaccaccttgaaaaagatcactttccttatagagttaaaacagaggggacttctttattatgttggctcaggtaaactgggcctcttctgattggttgctatgaatctcttgatttttggaaaactggcccatttcaaagttcagtgtgatgatgtggcacttagcacaagtgactccattttgatttggtctggtctgttggggcctagtgcaggagcctaatccaaaataatgaccttccctaaatttttgtttaataaacccatgcacattatcactttacagcttgagggataaaggtagcttcctcccttattgtagctgtttatttctaagtctctctcctccattggactatgtggtcctcaaagcagggatctgacagttcattcctgttatcttcaggtcatgagtatgagtacatgctcagtgcttaatatttggtagaattattgaaagggtagaagatgcaggagttttattgcatgaagtcttctaataacacccgtgatcatatgatgcatttactaagacttagtacaaggatgtgaacatatttttactgcatgcaagaacatggttccgtgaaatgaaagatggaaatattgtggtttgtggttctccaaaacaacattgtttgtggggtcagaggagaaaaaatatgtgacttaggaaagttgcaacagccttgaaaatgctgggtttgctgcttgacgagaaaaaaaccaaacaacaccctccccacaaactcccaagcacataaaactggaagaagagcctgtgtaaaatcaagccggatgccaaaagggacgggttggcagattggaatggattattgcgaattcctgcagccacctggcatgtgatttaacacttctctgagcttttgtttttccatgctattcggggctgaatttattcctatcttattgtccttgtcaaaagcaatgattttttaaaaggctgtatattttctttccattcttgtttacaccttgcttatcctgctgtttacaagattgatctctcacactctgcctgggtgttttctattcttgtgtagttaaaattgccagaggagttttttgagctgctctattttaaagaatggggggagccctactcccttgtggaatcccagcatggcatggcatctccccaataaaagaggcacgtagctattatgaacttatgaccaactgtgaaactttacacattcaagtattttaaatgcttgaaagtgcctgctgtgcatcttgttacagaaatgtaataccagacatgcttctcaaatgggttgatgactccttggaagttgcctggagaagcatgaaatgtagtttctttccaaagtggagcacttgctatcttctccctagcactgggttggaaataatgatatattgcctcctgtcccgtcccctctgcgggttgtcataattaaatgaaatgagggatacaaagttctttagccactaggcacttagtaggaatttaataaaatatactaagtgccactattttattaaataagaaattaataaaatatttaatacaataataaaatttattaaattatttaataaaataaaataataaaatttaataaacctcttattttattgtctccatttaacatattatttctctctttaacatatcctttaagaagtggctctagagagtatggcacaagagtttctacatgtttcaaatttacctgcttatagggtggatctaagtaagtgaaaatggcattaaagtagccaagaggaaagatttagtccaaagggaacattaaatagctgcatgtaattctccataatgggcatagatgttgacgatgatgatgaggttgttgcagggctgagactagagaaggtgagtaggacatttgcttttgtgcaaaattagaagttgccaaaaactccataatcaaaataaatagcacttagcgcaatgtttttcaaaaatcaaatgcaaaacatccatgatggacaaagatcaacattttaaataaaaataggatcaataacattgctgtgcagagtcacactggaacccagggcaagagaaaaaatcagtaatagcgaatctgtcttaattaaaaatgttgatattttattcatcatgaatgtcttcattcattctgattttctttaaaacattgcattaaaatattacttatgtagatttatgcttttgtggcaccaccttaaatcttgcgcctaaaagtgggctgctcacctatctggcctctccatgcccttgctctggggtgatgtccaccaggctgggaggaaagtcccaaagcggccttcaaatattcactccttattttctcttgacccactctgtagtcctgagttagtttaactatgatctcatgaaaagactataccaactgaaattctgatgtttttcccaatcaagtgactgcaatgaaaggtatagtttggaaggaacacaaagtaaatcattcattagaaacttggtttaggctggggtcagcaaacggtggctggcatcctggctggctgctttgcaggtaaagttttataggcacacaggcccacccatttgtttttgtgtcaaccatggccgtttctgtgcctcaatggcaaagttgagtcatcattgcaactggagaccgaacggtatgcaaagccaaaaatatttaccatgtggcgtgttgcaggaagaggttgcaggcttctgatttaggttattaaagcactcagatgttcttggatcagaatgtggttttggcagtgatttcgaacttccagttgtttggagactatatatcagaaaattcaaggatgtttacaaagaatcatctgtaagaagtgagggaaatggggaagggattagagttcaaaaagtaaatcgagagaagcagcaggtgtggtctgtgtctgtccctgccctgtggagttccatcagggcccagctgtgatttgacatcatagacatattacatacttacatgaacttgacatcacccataattgatggtaagcaaacaatgagtttgtgaaaaactgcattcatttgcataaatgaatcacataaatgattcatggatttaattacttcattctgttaatgtggtcaatttcaaattgacttacttcactaattcagcaagcatttatggagcatctatttatgcagaaactgtatgaatctccttcaaagtagtctacatctaagtctgagtgtcagcaaatagagatagggaggcctggaatcatattctgatgctccttgaatttggggtgcatagaggagaccacagggaaagaattggagaaagaaagctcattgaaggttctggatgctggttagggagcttcgactttaaccagtagccagtcagaagcttcctttatcgagggagtggcatggccacatctgcactttaattaggatgttaattgagtggtgtgtggaggggtagagggtggatgtaagtagaagttgggggactagtcagaaggcaatttaaatagtgtgggatggtttgtagacatacagaaatgacaaagatctcaagtcagtggcatctatggaaatggaaggaaagacatatctgagagaatgttggttagggtaaaaccaacaagtgctcagccacttgctgaggtcggcctcctgactttggagttgaagtgattgggaggctggagaagggaagaaatagagagtccagaagggaagaaaagcaagtagggggtcaaaaaaatacccccagggaaaagagaaatacaccagagagagagagagagagagagagaggagaggagagagattggtgctagaaataaagatttgggaattatctgagaaaagataatcatagaagccatgggcatagaaaacatcaacaagggaagaagttagagaatggagaggagctctgaagaaacaactgtggtaggattgtcagattaaaaaataggaagctcagttaacactgaatttcagatcaacaaagaataaaattttagtgtaagaatgttccatgcaatataaaaactattgatctgaaatttaaatttaattgggctttctgtctttttttgctaaatgtggccacctttgattgtggggattactctcatttatgggatgggcaaaagaggaggaaactggaagggtctaggaatggacagatagaccatcctggtcccaggagcaccaggatgttgcactaccacagaatcaaagggcagagtgggtttcagaagggtagaacagaaagctcaaagccattgcgtttggcaacctggaaatcagtaggcaccttgcaggaagcagagagaggtctggctgcaatagttggagtaaatataggaagagtgatgaaaataatcagacccttcttttgggatgcatgatggagaagaggagagagatagaattgtaaagggtaataaaatagaaggaaggcttatagaatcacagaggtggaggctgttttccagccttggggaaggagcccaggagatggtatcctgaagatgtaagaggggtggtggtgaagggatggagtgagatgtggatgatgctggaggggagaccaggatataaacggagggattaacctttccatgaaggatgctccctctttattggagtcataaaggaaggaagtggggagatgggaaaagatgtggtgattttgagagtagggaaggaagaccttttatttctttttgctttcagactgtgctatgagagtgcatgatataaaggagggattaggggagcgggggcgggggaactcaggctgaaaatactccttctttgctgattgcacaggacagatttgatgaagaactcaaaggtgcttataattcatccaactgggagcaatttatttccctcctcttgtgtcttcttccagctccagagatccctatcgattcacagcatagctgaattactcaccagggaagggaaaataacagaaacagaactgaacaggcttactgtcctccattttattcaaccaggagaccctggtcttaaaaggatcagggccatttatgctcatccctagtcctacaggagcgcaggagtgggcattttggggaatgtgtgggattcctagtctggagtctgtgtctgcagattgtgtcatgtggggttaatggctttgccatgtcacacccagcataccagggactcacagatatacaggagacacacactaaccccaggcacccttctgtcttttagaagctgaggtcaaaaggcagccaggctctcctgcaaatgggagaggatgagactgaggaagaaaacagccacaatctcttagccacttttcctctctgctggtaagagcagggatgcctttgtggcacaggaaggagccatttgtagaactgaggaagcctgggaaggctgagagaggtatttcagggaggaggtggaggagtgctgtctacccagggaagctcttcagtggctccacctccagagaacagcaacatttccaacttctctacagtcctcattctctccctcgctctcgccccaacacaaaagcacagatgaaattcctaaacatagcctgggtgtggtggctcaagcctgtaatccccagcactttgggaggctgaggtgggcggatcatgagatcaagacatcgagaccatcctggccaacacggtgaaactccatctctactaaaaatacaaaaattagctgggcatggtggcacacacttgcagtcccagctactcgggaggctgaggcaggagaatcacttgaacccgagaggcggaggttgcagtgagctgagatcacgccactgcactccagcctggtgatagagtgagactccatctcaaaaaaaaaaaaaaaaaattcctaaaagtaaaccactgctgtctagttatttttagtatttgctgttagtatttatcaagcctttcagtgttaatttgtctgcccactcatttcttttcctgcctccacgtgctgggcttgggatggaaggagcacgcataagcagcagctggtgacctcacagaaatatgtcctggagagtagaggctgtaagcctttaaaatcgatcttctccacccctgccttgcagagaagaaagaaaggtctctattccgttagccttggagagcaacacagttgttggtgaaagtgaaaccattagaatgtctaggtggtatttagttaggtcaggggcccctgctgaagagctgggtcagggaatccacacatgtgcacaatgtcataatgcaagcaaaaatgggtcagaggccaggtaagcaagcagaaattaggaggaagcacatgctgggggagagaaaagtaaaaaaagccatggcatcagtccgggatttgagggagctgaaggttgacagtaagatgagtagggctggcgttgaaaaggccagaggaggaaagctctgcagcactctgataagctacagcttaatgctgcaacactgcttgttcctgccttggctgtcggtccagtcacctggaggcagccttgcccagagcagccacattgctctgtagaggaactctagggcatgttctaacagagggctgttgaaaggagcaggaccagtccaaatatgagtcacatcagcctgcgtggtcactggacccctggccaacccatgagtgtattcatttcttaggaagcagaaagaagtttctttttactacttcaaaaaacgtattggcttcctttttgcattcttttcttacttcattattttttccaatttctaggaaaatgaagttaaaaaaaaaaaaaaaaaaactcagtggatgggctaacatgagaatggagtggacagaggaaagaatcagtgaacttataagtagaatagtagaaattaccctatcttagcaatagatcaaataggctgaagaaaaaaaagagggcacggatctatgggaatatgaaaactacctaacatgtgttatcaagagaaaagaatgtagtgggtgtgatggctcacgcctgtaatcccagcactttgggaggctgaggtgggtggatcacttgaggtcaggagttcgagaccagcctggccaatatggtgaaaccccatctctactaaaaatacaaaacttagctgggtatggtggtgaatgccagtaaccccagctacttgggcggctgaggcaggagaatcacttgaactcaggaggcagaggttgcagtgagccgagatcctgccactgcacactaacctgggtgacaagtcgagactccatctcaaaaaaaaaagaagagaaaagagtaatgcaaagaataaaaatggggtaagtacaataaagtttacttctcctcttaagttttctaaattatatttcatggttaaagcaaaaaataacactatccgatgtagttcttgatgtacgtagataaatatttaagaaaattattttatagatgaggaaaagtaaaggaatgtaaagggaggtaagaattctaccaatacactctggtaagttgtgtatatttattataataaggagagcaaccattgaaaaagtgagataaagagatatacctaaaaacactatagataaataaaaatggaattcttaaaaagtcctaaatacccacaataagtctagaaaatcaaaataaaggaaaaaaagtagagaacaaacaggaaacaacaaaaatggcagatattagcccaagtatatcaacaattacattgactacaagtggcgaaaatatacaaatgaaagatgattgacataatggattttttttttgacatgatggatttttaaaaaaccccaactatatgctgtttataggaaattcctgtcagatataacaatataggagggtaaaaattacagaatgaaaaaatgttttaatgtaaatattaattttttaaaaagcaggaatagctatatgaatgttaaaggagactttagagaaaagaaaattaccaaggacagagagagatattatataatgataaaagggccaatctaccaaaacaacatagcaaacatacatattttgcatgcaaaccctaaatatatacccaaaaaagtgaactgcaaagtatgtgaaacaaaactgatagaactgaaaaaagaaataggcaaattcataataagagttaaaaacctcaacacacttctctcaataactgatagaacaactagacagaaaaccagcaaacatagagaagaccataacattatcaatcaactagatctaatttatatttatacaatccacccaacaacagaagaattgactaacaaaatgtataccaaaatataccataaaccataaaacaaacctcaacaaatttaaaagaattgaaattatacaaagtgtattctctggctataatcaaatcaagatagatatccccaacagaaagatggcaggaaaatctccaaacagttggaaataaacaacaaactttcaaatagaatctgtaggtcaaaaagaaagtttcaaagaaataaaaaaatacgttaaagtgaatgaaaatgaaaatacaacatcaaaatttatgtgactcagctaaagcagttctgagaggaaaatttatagcactaatataatgcttacatttgaaaagaggaaagtctcaaattgataatctgagctcctatctgaagaaactagttttttaagaaactagaaaaagagccaaatatacccaaagcaagcataagaaaggatataataaagataaaagcagaaattaataaaactacaaggagaaaaacaagaaaataaacaggctagttctttgaaaagaaaattgataaaccttcagcaacactgacaaagaaaaaagaagatatatattgccaatatctggaattacaaaggggacatcactacagacctgcagacatcaaagagaataataaggacattctacaaataactctacacatttgacaacttatatgaaattaagcaattttccagaaagcacaaactaccacaattcatacaatataaaatagataattttgatagtcttgtaactgaggaaattgaattagtaatttagaaactcccaaaacagaaagttccaggtccagatggtttctctagaaaattccataagacatttaaagaataattaataccaattctctacaacctcttctagaaaataaaagatgaggaaatatttcccaattcattttatgaagctgaaattattttgataccaaaactagaaaaagcacaataaaagaaaactagagactaactactcttataaagatagatgtgagaatcctaaaaatattgataaatagtgttcagtaatatataaaggtaattatatgccataaccatatatttattctagggataaaagaatggttcaatatttgaaaatcctcaatgtaattcactatataaacagtctaaagaaaaaatcacaatcatactaattgatgtacagaaacccatttgacaaaatgaaacaacattcatggcaaaaacttagagaaataagaatagaaggaatctccctcaaattgataaagagtatctatgaaaacgcctatagctaacattgtacttaatagtaaaagattgaattctttctccataagatcaggtaaggatgactgctctcaccactcctattcaatatagtactgaaagtttgacatgcaatagagaagaggaaataaaatccatacaaatcagaaaggaaaaaggaagaaataaaaccattcctatttgcaggcaacacgattgtctactagaaaaattcaatggaatctataaagaaaaaacctcttagaactaataaatgagtttagttaggttgcaggatgtaagataaacatatcaaaatcaattacacttttatatactagcaatgtacacatgaatataaaaattaattatacaatatcatttacaatctcaaaaacatggaatacatgtgtgtatatctaatgaaacatttatgggatttatatgctgaaaactacaaaatgccaatagaagtaatcaaagagtatctacatagtagagaaatgtggattggatttgtgtttgtggattggaagagtcaacttagtaaagatgtcagttctccccaaaatgatattcagattcaagtttaatgaaattcttataaaaattccaacaagaattttggagacatatataagattattctaaaatttatatgcaaaagtaaggcaactagaatgtctaaaataatttcaaaaaggaaaaataaagtaggagaaatcactgaacctaatttcaaaattagtatagctatcgtagtcaagactgtgtggaattagcaaagagagtgatacataggacagaacagagaacttgaaaacagtcacatattcatcaccccacaacttaaaaagcaactcaaaatagatcatacacttaaaataaaacataaaactagaaaacttgtaaaagaaaacataccagaaaatcttcaatacctatggactgttgaagagttcctaaacatgatatcaacagcatgatctataaaagaaaaaaagtcaataaattggacttcatccaaatttaaaatgtttgttctatgaagaactgtgttagaaggatgaaaagaagctatagactaggagaaaatgtttgcaaaacacgtacctagattaaagaactccaaactcaacatttttttaaaaaaacaaaaatccaatgagggaatgggcaaaagagatatcttattgtaaatgatatttggatggcaaataagctcatgaaaagatgttcagcatccctagctactggggaaatgcaaatgaatgccatgatgagatagcaccacacacctattagaacagctaaaataaaaatagtgataatgcctgtattagtctgttctcacactgctaataaagacatacctgagactgggcaatttataaaggaaagaagtttaattgattcacagttcaacatgactggggaggcctcaggaaacttccaatcatggctgaaggggaagcaaacatgtccttcttcacatggtggcatcgaggagaagaatatgtgctcagcaaagggggaagcccctgacaaaaccatcagatcttgtgagaactcactcattatcatgagaacacattgggggaaccgcccctgtgattcgattatttccacctggtccctcctacaacacggaattatgggaactacaattcaagatgagatttggggtgggacacagtcaaaccatatcaatgtcaaatgctggtgaggatgcaaaaaaatggaattaccatgcaatgctggaggttaaaatgctagagtcactctggaaaatagtttagtggtttctttaaaactaaacatacatttaccatgtgacccagaaacactctcctggacacttattccagataaactttggaatgtgaaaactttatctacacaaagcctgtacataattgttcctagcagctttatttttaatagcccaacactggaaacaaacaaaatgtcctacaataggtgagtggttaagcaaactgtagtactttcttttttttttattatactttaagttttagggtacatgtgcacattgtgcaggttagttacatatgtatacatgtgccatgctggtgcactgcacccactaactcgtcatctagcattaggtatatctcccaatgctatccctcccccctccccccaccccaccacagtccccagagtgtgatattccgcttcctgtgtccatgtgatctcattgttaaattcccacctattactgagaatatgcggtgtttggttttttgttcttgcgatagtttactgagaatgatgatttccaatttcatccatgtccctgcaaaggacatgaactcatcattttttatggctgcatagtattccatggtgtatatgtgccacattttcttaatccagtctatcattgttggacatttgggttggttccaagtctttgctattgtgaataatgccgcaataaacatacgtgtgcatgtgtctttatagcagcatgatttatagtcctttgggtatatacccagtaatgggatggctgggtcaaatggtatttctagttctagatccctgaggaatcgccacactgacttccacaatggttgaactagtttacagtcccaccaacagtgtaaaagtgttcctatttctccacatcctctccagcacctgttgtttcctgactttttaatgattgccattctaactggtgtgagatggtatctcattgtggttttgatttgcatttctctgatggccagtgatgatgagcattttttcatgtgttttttggctgcataaatgtcttcttttgagaagcgtctgttcatgtccttcacccactttttgatggggttgtttgtttttctgttgtaaatttgtttgagttcattgtagattctggatattagccctttgtcaggtgagtaggttgcaaaaattttctcccattttgtaggttgcctgtttactctgatggtagtttcttttgctgtgcagaagctctttagtttcattagatcccatttgtcaattttgtcttttgttgccattgcttttggtgttttagacatgaagtccttgcccatgcctatgtcctgaatggcaatgcctaggttttcttctagggtttttatggttttaggtctaacgtttaaatctttaatccatcttgaattgatttttgtataaggtgtaaggaagggatccagtttcagctttctacatatggctagccagttttcccagcaccacttattaaatagggaatcctttccccattgcttgtttttctcaggtttgtcaaagatcagatggttgtagatatgtggcattacttctgaggcctctgttctgttccattgatctatatctctgttttggtaccagtaccatgctgttttggttactgtagccttgtagtatagtttgaagtcaggtagtgtgacgcctccagctttgttcttttggcttagggttgacttggcgatgcgggctcttttttggttccatatgaactttaaagtagttttttccaattctgtgaagaaagtcattggtagcttgatggggatggcactgaatctataaattaccttgggcagtatggccattttcacgatattgattcttcctacccatgagcatggaatgttcttccatttgtttgtatcctcttttatttccttgagcagtggtttgtagttcgccttgaagaggtccttcacatcccttgtaagttggattcctaagtattttgttctctttgaagcagttgtgaatgggagttcactcatgatttggctctctctttgtctgttgttggtgtataagaatgcttgtgatttttgcacattgattttgtatcctgagactttgctgaagttgcttatcagcttaaggagattttgggctgagacagtggggttttctagatatacaatcatgtcatctgcaaacagggacaatttgacttcctcttttcctaattgaataccctttatttccttctcctgcctaattgccctggccagaacttccaacactatattgaacaggagtggtgagagagggcatccctgtcttgtgccagttttcaaagggaatgcttccagtttttgcccattcagtatgatattggctgtgggtttgtcatagatagctcttattattttgaaatatgtcccatcaatacctaatttattgagagtttttagcatgaagggttgttgaattttgtcaaaggctttttctccatctattgacataatcatgtggtttttgtctttggctctgtttatatgctggattacatttattgatttgcgtatatcgaaccagccttgcatcccagggatgaagcccacttgatcatggtggataagcttgttgatgtgctgctggattcgttttgctagtattttattgaggatttttgcatcaatgttcatcaaggatattggtataaaattctcttttttggttgtgtctctgcccggctttggtatcagaatgatgctggcctcataaaatgagttagggaggattccctctttttctattgattggagtagtttcagaaggaatggtaccagttcctccttgtacctctggtagaattcggctgtgaatccatctggtcctggaatctttttggttggtaaactattgattattgccacaatttcagatcctgttattggtctattcagagattcaacttcttcctggtttagtctcgggagagtgtatgtgttgaggaatttatccatttcttctagattttctagtttatttccgtagaggtgtttgtagtattctctgatggtagtttgtatttctgtgggatctgtggtgataccccctttatcattttttattgtgtctatttgattcttctctctttttttctttattagttttgctagcagtctatcaattttgttgatcctttcaaaaaaccagttcctggattccttgattttttgaagggttttttgtgtctctatttccttcagttctgctctgattttagttatttcttgccttctgctagcttttgaatgtgtttgcttttgcttttctagttcttttaattgtgatgttagggtgtcaattttggatctttcctgctttctcttgtgggcatttagtgctataaatttccctctacacactgctttgaatgtgtcccagagattctggtatgttgtgtctttgttctcgttggtttcaaagaacatctttatttctgccttcatttcgttatgtacccagtagtcattcaggagcaggttgttcagtttccatgtagttgagcggctttgagtgagattcttaatcctgagttctagtttgattgcactgtggtctgagagatagtttgttataatttctgttcttttacatttgctgaggagagctttacttccaagtatgtggtcaattttggaataggtgtggtggtgctgaaaaaaatgtatattctgttgatttggggtggagagttctgtagatgtctattaggtccacttggtggagagcttagttcaattcctgggtatccttgttgactttctgtctcattgatctgtctaatgttgacagtggggtgttaaagtctaccattattaatgtgtgggagtctacgtctctttgtaggtcactcaggacttgctttatgaatctgggtgctcctgtattgggtgcatatatatttaggatagttagctcttcttgttgaattgatccctttaccattatgtaatggccttctttgtctcttttgatgtttgttggtttaaagtctgttttatcagagactaggattgcaacccctgcctttttttgttttccatttgcttggtagatcttcctccatccttttattttgagcctatgtgtgtctctgcacgtgagatgggtttcctgaatacagcacactgatgggtcttgactctttatccaatttgccagtctgtgtcttttaattggagcatttagtccatttacatttaaagttaatattgttatgtgtgaatttgatcctgtcattatgatgttagctggttattttgctcgttagttgatgcagtttcttcctagtctcgatggtctttacattttggcatgattttgcagtggctggtactggttgttcctttccatgtttagcgcttccttcaggagctcttttaggtcaggcctggtggtgacaaaatctctcagcatttgcttgtctgtaaagtattttatttctccttcacttatgaagcttagtttggctagatatgaaattctgggttgacaattcttttctttaagaatgttgaatattggcccccactctcttctggcttgtagggtttctgctgagagatccgctgttagtctgatgggcttccctttgtgggtaacctgacctttctctctggctgcccttaacattttttccttcatttcaactttggtgaatctgacaattatgtgtcttggagttgctcttctcgaggagtatctttgtggcgttctctgtatttcctgaatctgaatgttggcctgccttgctagattggggaagttctcctggataatatcctgcagagtgttttccagcttggttccattctccccatcactttctggtacaccaatcagatgtagatttggttttttcacatagtcccatatttcttggaggctttgcttatttctttgtattcttttttctctaaacttcccttctcgcttcattccattcatttcatcttccattgctgataccctttcttccagttgatcgcatcagctcctgaggcttctgcattcttcacgtagttctcgagccttggttttcagcttcatcagctcctttaagcacttctctgtattggttattctagttatacattcttctatatttttttcaaagtgttcaacttctttgcctttggtttgaatttcctcctgtagctcggagtagtttgatcgtctgaagccttcttctctcaatttgtcaaagtcattctccatccagctttgttccgttgctggtgaggaactgcgttcctttggaggaggagaggcactctgcgttttagagtttccagtttttctgttttgttttttccccgtctttgtggttttatctacttttggtctttgataatggtgatgtacagatgggtttttggtgtggatgtcctttctgtttgttagttttccttctaacagacaggaccctcagctgcaggtctgttggaataccctgccgtgtgaggtgtcagtgtgcccctgcttgggggtgcctcccagttcggctgctcgggggtcaggggtcagggacccacttgaggaggcagtctgccggttctcagatctccagctgtgtgctgggagaaccactgctctcttcaaagctgtcagacagggacatttaagtctgcagaggttactgctgtctttttgtttgtctgtgccctgcccccagaggtggagcctacagaggcagccaggcctccttgagctgtggtgggccccacccagttcgagcttcctggctgctttgtttacttaagcaagcctgggcaattgcgggcgcccctcccccagcctcgctgccgccttgcagtttgatctcagactgctgtggtaggaatcagcgagattccgtgggcgtaggaccctccgagccaggtgtgggatataatctcgtggtgctccgttttttaagctggtctgaaaagtgcaatatttgggtgggagtgacctgattttccaggtacgtccatcacccctttctttgacttggaaagggaactccctgaccccttgcgcttcccaagtgaggcaatgcctcgccctgcttcggctcgcactcggtgcacgcacccactggcctgcgcccactgtctggcactccctagtgagatgaacccgatacctcagatggaaatgcagaaatcacccgtcttctgcgtcgctcacgctgggagctgtagaccggagctgttcctatttggccatcttggctcctcccctgcaaactgtagtactttcatacaatggaatactactcagcaatgaaaaggaacaaacaccactgatacatgcaacaacttagatgaatttaaaggacattatgctgagtgaaaaatatccaaatgtcacatactgtatgattgtatttactaatattctaggaatgacaaaattataaagatggagaacagattagtgattgtcaaggatgaggaatgggggcacaaggggtgagtataactataaaatggtagtaggatggagttctgtgtggtgatggaacacttctctatcttgattgtagtggtggtaacatggatgtacatatgtgataaaataatgtggaaatgtaaaaaaaaaattacatatgggtttgcctcaacacaaatattgttcattcttgctattcttgggcttatttatatgtgaaaaagataccatttgtatgtagttggctgttacttgctttctttcattcattatgtttctaaggtgtacccaagctattgcatgctgctgtggtttatcgatattccatgttatctaatattccatttaatgactatcactcaagttatttccttgttctcttgttgatggacatttgtgttaaatctagctttttgctatgtcgaaaaagtcatgtttgtgcatgtcttctgggaaagtgtgcaagagtttctctggatgtctcagtctgtctgtactgctataactaaatacctgagactgggtaatttataactaatagaaatttatctctcaccattttggaggctgggaagtccaagattaagatgcaggaagtttaatgtctcgtgaagcctagtctctgcttccaagagtgttgccttctcaggagtggataaatgctatgtcctcaacatggcagaagggcagaggggcaagagggcactcccttcaacctggagcccttttataagtgtgctaatcccagttgtgagggtggagccctcatgacttaatcaccacccccaaggccatatctctcaatactgttgcattggggattaagttttcatataaattttagaggggacactgtcattcaaaccatagcactagagaatatacataggagtgatttgctcagagggagggtatgagagcattctacttcataagagaaggttaaattgttccaagtggttatatcaatttctacccccactatcagtttaatttgcattttcttaattaaagatgaggttgctcatcttttcctacatccattcaccattcatgtttttctcttctgtgatgtgcctgtcagatcttctgcttatgttttttctattgtgttgtctttttatgactgatatataacatttctttttataacctgaatactggtcttttgttcatttcaagtgttgcaaacttgtctcacatattggcttgtgtttttgccttcttcattgtacctttggatgaatgcaagctcttcatattacggctgcaaatttatcaactttgccttccttttatggttaacacttttgtgccttaagaacttctctcccatttaaagatcagaaggatgtttccctgtattttcttctaaaagtttaaaccttttgctttttacaactaaatctttaattcctctggaattaatctttgggtatagttcctcctttacttttggctcagttattccacacttcatgagaaccctgttatcttgtaatagccaggtggatgagaaagtcaaggaagaaaaccctcattcacaacaagatgtgggaagctggctaattcttccttaggtagcctcgaaataaattttggtaaaatgaactagctttcctttgctgtagccaaggatatttagaaattttgcaaatgtttgagtgctacatgttaaaaagtaaaacaaacaaaaagcaatgaatctcctctcaccatttgagctatgtctcagatcatttaaataagctatttgttgagaaaaaaagcatacatttaaaatgcctgtttgtatagtattcagagtatgggttctgcttttaaagaggcaatgcaatttattggaaatatcaccggacagggagtcgaaaggcttgtgtttaagccttgatctgtcatcacctggttgagaaacctcttcctatcagttaggattatgtgcagtggcctgtaacaagaatccttctacagtggcttaaccaaataggatttactttttctcatgtaacagcctagaagcaggcaagccaggcccagtgcagtgactccttctttcagcttaggcttcgttcacagcatgtggcttttgttttcatgcttgtgacttcatgactgcaagagataaatcttcctccagctttgcatcagagttgcaggcatgatgaagaagaagggcaaagaacaaaaagtgaatgccagggtcctttgaaagtacctttccaggagccctacctagtaacttcagcttgtttgcatctccagaacaaaattgttccacctggccatcattcttagctgaatcataacatggcaaattcctgccctggacaaaatcaagattctgtaagggaaaagggtagacttgttattggataggcaactggcaatgtcttccccactgtctaagctttcagtggggatgcctgcccactgctgacagggttgttttcatgacaaaatagaagatcaaatggaagagtgcttcatacactgtaaaatgtatttaataaacagagtggaaatattctgaactattttctcagagagcaaatccaatgttaatagaaagttcaggctgggtgtggtggtttgtgcctgttatctcagcactttgagacactgaagtggtaggatcacttgaggcctggagtttgagaccagcctgggcaacatagcaagccctcatctctattaaaaaaaaaaggttagccaggcatgttggggcatccctgcagtcccagctgttctggaggctgaggcaggaggattgctttagcatagaagtttgaggttacactgagctattattgctctactgcactcccatctgggtgacagagtgaaactctgtctcccgaactctgcaaaaataaataaataaataaataaataaaaaagaaagtccagctaaatatagagccttgggtcatcaatatctattgaacttccactcattctcttttggacatctgcagatcacctgagtactagggtttttatagacacatatcctcaaatatcagtcttcagattattgtcaagcactgttgtggtggacatttgctgatccacttcccactttccctttcctctaaccccaatgtctctctgtgtgatgtttgtttggattgaccctactcttacctccagggataagccttgactagtttaagccatttgatatatgagaccccaaaatacagtggccgattcagcaatgggccctcagaatgacctcagaactttcactgggactgccatgacgctgacactgtcctcttggatgatagatatatgatcttgaactgctacagccatttttattgcgccaggaggggagcagcctgagggtgaagccaattcacaaagaatacctgtaccaagagaattgtctagaatcaaatgatacaacaaacttatggtttcccaaaaccagtcttacttttgggttttttccccagctcaatgaaacaaacatttccttattttgttatttatttgtataagtgagtttgagctgggttttctgttacttgtaaccaaatgattcctaagtgatagtttctatatacattccaggaaaaattacatacattacattattttaacatattattcttttaaataattgatatatatttaaataatgtatttaatatatatgtatatgtatatatttatatttaagttcatttattctaatgtttataatccttcctgaattaagaccataaggcctgaatgttacccagcatgcctgtttctccctgtaataaattgcctgcgtagcatctgtccagagaagtggactgtgagatgctcagagctgattcctactctttggagactgtgcctgttattcctgggttacaagactcattcctgagtactttgaaccaaaaaccaattaggctgatacacgtcagtgttcttgtaggtgtgtttcctgtttcctgtttgcaaaggcaactacaaaagaaataaaagtgacagtctcaccaaaacttttacagagctgtcaaatgttcaagtacaatattcgctaattatgagtgatctcagttgcaaggcatctgatctcctggtgttaaaatctgtcgtgataccgaggaaggccccgagatcccaggcactgagtgactgcatactgtgagttagttttttaatctcttgaaagggttaaattgtgtaaattacgattcaaaatgcaaagctgtatcctaggtaggtttgtgtgtgtttatatatttgtatttgctaagtagaaaaataagctttgtcatggggtagccatttccatttttaactcttgatgaatgtgtatgttactgaaaagaaagctatgcacccattttaattaaaaaaaaatcctgctctcttttctggtgactgattaagcggaaaccttatttaagtacaagagatttagtaaaacaaaacaggacatatgataatggagtaaaaacctggcttgttgattcctggaaaaaaggtaatttatacccctccttactttccaaatggactcatttagtatagaggaccgaagaggatattatgcagcaagtagaggggatgttttctaattcaaaaaagattcttttgaaattctattatagtataattagggcagcagcaccagcaatagtgaatttcctgttagaataggaacattattactttcctaatttgttgatatgagtctcaaaagccatctcattgaacagttaggaaattggcttttcaggaagggaaatctactgaatttcttggaaacttttcaaaataagttaatggccccagacgagagctagtgaagaattgcaggcaaagtcatatggcttagacctcagtaatgttttgtgcctgtttggaaaaaagtcatgaagattaatctgatatttacttggtcaaacagttgtgtatgaggaacaaatggagaaaataaaataaatgggggcagggcagatacattgatatcaaatgaaacttgagtagacttagctcttttcatcccacttccttttcccccattaagtctttatggtttaattactacctgagcaacatgactcacctggatgtaacaagaaagtgaaagtgaaaagcttttattccaaatttggtagtccagtccttctaatgagatctatagaagagtaatgaaatatttgaagtcacgttaaacaaaatctaatgttttttttccctcatggcattgagaactaagtctcagccctattgcatttctcctggaggccaagatagaattgtgcattgtaactagtaatgatcaggcagtctgggaagctccttcttcttgagataatttggttgaactatttatggatatcacaacccgagacatggcagttgccattgctttagttccttggctctttctgacatcaagctaaagcctaataggaaaatgtgtgtttttgcctaaagacagtaaagcttgagtaggatttaacataagaacacttccccttggcatggaggtgtggataatcactatgatgctattggcttctagtcatttctgtccctcctgcagcacctgggtccttctctgtgtttattgtttcaggggcaggtaattccttgctagagtgagctccaaataagctagacttcatctctcattcacatggagcaaagggagactgcgagagttcatgctgcaggtttgcagcatctgccagacccaaacgaggatgatttggatgagaaattgacagaaaagctcttggggcagtgaagaagccactccctgcttgactactagtgggcttgagagagtagtgggcaaggcagggaagaggatggcttcttcaacagaggttaaacttcctaacaggggctttccataagaatggcctgacttagcaaatactgcccaaatttcctgggctgtttgggattttgtccaagaatttcagacaatttagtaaaaattgcctagtggcagaaatccagataaccatagatgggaagaatacatataaagaaattatttgaaagcaaggtatatgaatagactctaggtttataattattactgatttcctgttgtttggatatcgctctttagcctccttaagtcaggatggttttgtctgggtccccaagaaatctgtactcttcccaaggctccctatgtgactagcttcttagttataggatgttacatggaatttcatttttctgcagttttctaagctaaagacttctttgctcctcctcttaaaagaatgaatgcgttttagcccttttagcctgggagcccattattctgtattttcaatgtcccacaaattcccctctgtcaaaaaacattgattttgtcaacagaatacctttcatttaggaataatatggagagagattatctcagaggctgagagcacgagacaccaaatattcagaggataattaaagtgttcttccagatgttttcaaatatagccacagagacaaatactgatcagtcgagtaattgattccctgccaactattttccatccagtcacgttcttaatgccaaaacagctaataaattcggtgaaaaacaaaaacaaaaacaaactgcttttgtattagtatgtagaaaaaaatagagagtagtttatttcccagcaattttgcaacaaattgtttagtgtcatacagacataggagaatggtgtttgctggagataaatgatgatttcaattaaccaacaaatgttgactaagtacctactaacttgagccctagagaagaatgatatggtataacacggacttacatatttggtaatagattatgtttctagaagcataattcatttatttgttcaataaatatttattgagcagttgctatgtgacaggcactgtgttaggtggcagggatattaatagggataggaaggcatgcggctgagaagagtggggttgggagtgaagttaatcaaataatcacacaaatacattttacaaatgtgttaagtactatgatagaaaacaacaacagcaaaaacaaggaactatgagactataaaatgcaggtaccacacctagtctcagtggggatcagggaaggcttccctgcagaaatctgaaggtgttggagatgggcagaagaaaggccagagcagaggttctaaggtagaagggaacatgcagcttactaagaattgagccaaagctagtattgctggagagcaaggcgggcatcctatgggggaaagctagaggggtggcaggagccagatcatgaaagactttagtagagaatgaatgaatgaaccaacatgagtagtttataacaggaaatgagtcctgtggtcttctgtaaaaatgaaaggagtttgcaattgtataatgacactgctgatagggagaagatattcatttactcacccagccaatatacccaagacaaaatccctgttcccatggatctgaaattctagtggaacaggcagataatatgccaataaggaaatatataggttttatactaagtttttgcttataagtaagtagtatgggtctttagatagaatttaaacatgatttcaaatctaaattgtattgcatgtaagtgtggttattcttctgtttagttaaataacagcatatactctagaagacctaagaggatgcttaggacagatgtccttcatagtacccaaatcacggtcaaagacttcgaagaaatttcaagagaggaaaacgagagggaaaccaggctttgtattaatttgttcttgtttctgagacaatagtgatcccattgtcctccctgtgcctcattctggagtggtgaggggaggaggaagggagcaatacaaagacttaaatgaaactcacagagtctaacactgatggagaaggagctgagcggaagagcatttcagagtctatttctttggttttattttctttatttgtttttgaaatgggatctcactctgttgcccaggctggagtacagtggtgcaatcttggcttactgaagcctcagcctcctgagtagcagggactacaagtgcgcaccaccatgcccagctaatttttgtattttttgtcgagtcagagtgtctcactgtgttgcccaggctagtctagaactcatggccttaagcagtccttctgttttggccttcctaagtgttggagttatagacgtgagccaccacatctggcctctatttcttcttacaaaaagaccttattataccttatatatttaatatgctttatacattttgcacatttagcatatctagaaaagtttcacatcttagaatcaatgtacatatttaaggagatggatttctttctcacattctcaaaagttgttatttcatattgcttcttaaagccattactgacttacaacacagaaaacaatacatgcctggaaacttatttgaggttttcaactgtgcctgtcttttatgaaggtctgctggaagacttcttgatgcaatgtttgcatagctacatagagagtattactgacatcagtggaattacaccagggcaccagtgaggattaccttcaggtcttgtttgcaaaagtcagagggtttgatgtaagtaattcattatatcaaagggaggcataataattatctgttttaatcttcaggaacctccttgtttctgactttcctactgtatgaatcaaagtgattatttctacatatgctgtcttagtctgcttcggctgctataacaaaatatcataaactgggtggcttataaacaacagaaatttatttcctacagttcttgaggtcgggaagtccaagattaaggtgctggcagattcggtgtctgtcgaggtcctatttcctggttcgtagatggtgccttctcgctgtatcctcctatggtggaaggggaaaagagaccctggggtctcttttatgagtacactaaatccaccttcatgtcctaatcagctgccccaaactccacctcctaatataatcaccttgggggttaggacttcaacatatgaatgtggggagggaggcagacacaaacattgagaccatagcatatgccaagaatcttagaattgggaggaatgatggacatgttgttagcgtgatccttcagtatgtttttttcaacatagcactattgtcattttgaaccagataattcttctggaagggagtgtcttgcacactatagaatgtattgcagtatcctggtgcctgtagtatattccccagtcatgacaaccatctgaagacattgccaaatgtctcctgggaagggcaaatatcaccctcagttgagcacccctgctttagtgcatcttaatcaatgactcacactgctctgttttagccttgtattgtagttgtatcacaaatgtgtgcaattctaaatgtgtagctgtaacaggatggtatctttgcagttctataattctcacatccaaattgaagatgatattatgaaaccagaattataagatgaaataattagatatttactcagccaagcatgtgaaattctaacgtgataatatgtttttctgggagccttgttttatttgttaaagccttagaaaattttaccctcaaagtttaaaacttagtggtttaattgtttcttaagaagatacatttatgagagtcttaatgccacaaagactccacttcagtcagctgcaagaattaagggccttttggtccttggcaccaaacttaaatgagacataaatgaggcacatttaatgaaatcaattctagttttataggaagctgagaataacagagagaaaaaaagtgctgctcttgtgtcctttggtgatggtgtttgacattttagtgtaatttattataatagtatactggttaatgttcccatattatcggcggtttaatcaaagttcctgaaaatgggaagaatgtgttctgtcactgtaaagctaagaaatggtatttcaaaattacttcaatcatacatgattagatcttctaaactggtattttactgtgctatggtgcagtgaagacttcaaattgcaaaaatgtacttagacatgtagtaatatatgacaccattaaagagattatttttaaataaaattcctttttatttgtatttttttattttaatagatatttcgttaggtggttttatgaaagtgaaattcctttttactgttatcttttacctcacttaaaggcttcctgccttaaagtgtcacatgtagttcaaatgagccaatattatttgtaaaatagagtttcttttgtgtcgtgatgctgttcagaaatattaaggacttctgattatctcaaaaataaagttctaagtccttttcatgacattcgaggccctctagtaactggcttcaatcaatcttttcacatttatctccattacctccctttgccttgtccccatatcttattccagccataatgaaggaggtggcccgggtcatctttgcacttttctgcctccatagcacttctcatgttgtgatttctacccctcaaattctaatccactcttaatcatttatttcacaaaacattctcaaattttcttagttggaattaaactttcttttttttgtataatgctttgaagcactagactagtgcttttcacactatctgggggagaattcaatttttgaaaaactttccaattcatcacaagtcaataggtgtcctgtctgtgactaccagtgagaggtgacagcgtgctggcagccctcacagccctcactcactctcagcgcctccttggcctcggcctccgctctggccatgctccaggagcccttcagtccgccactgcgctgtgggggcccctctccgggctggccaaggccagagccagctccctctgcttgcagggaggtgtggagggagaggcgccagtgggaaccggggctgctgcacctggcgatcgtgggccagcatgagttctgggtgggcgtgggctcgggctcagtgggccccgcactccgagcggctggccagtgctgctggccccgggcagtaaggggcttagcaccagggccagcagctgtggagggtgcgccaggtcccacagcagtgccggcccaccagcgctgctctcgaattctcgccgggcctcagctacctcccagcagggcagggctcgggacctgcagcccaccatgccccagcctccctcaccgccccccctcccccccacaccatgggctcctgcaaggccccagcctcccagactagcgcagccctctgctccacggcgcccagtcccatccaccgcccaagggctgaggagtgcaggcacacggcacaggactggcaggcagctctgccctgcggccctagcagggtgatccaccagaggaagccagctggtttcctgagttgggtggggacttggaggacttttatgtctagttggaggattgtaaatgcaccagtcagcagcctgtgtctagctcaaggtttgtgaatgcaccaatcagtgctctgtgtctagctaatctagtggggacttggaaaacttttgtgtctagctcagggattgtaaatgcaccaatcagcaccctgtcaaaacggaccaatgagtgctctgtaaaacagaccaatcagctctctgtaaaatggaccaatcaacaggatgtgggtggggccaggtaagggaataaaagcaggctgtcccagctagccgttgtaacccgttgaggtcccaccacacagtggtggttttgtgtttttcccttttgcagctcttgctgttgcttgctctttgggtctgtactgtctttatgagctgtaacactcacagtgaaggtctgcagcctcacttttgaggccagcgagaccacgaagccactgggagaaatgaacgactccagactggcggccttaagagctgtaatactccccgcgaaggtctgcagcttcactgctgaagtcagtgagaccacgaacccagcagaaggaccaaactctgaacacgtctgaacatcagaagggacaaactccagacacaccatctttaggaattgtaacaccatgagggtccacggccttattcttgaagtcagtgagaccaagaacccaccaattccggacacaccagtacttagaatctaccccaggaaactcaccgtggaagtttggcagtctccaaaccattctataccccattcaatgagatgagtttacttgattacacatttggatgctgtggcaatgtccagctcctgtagaagtttattgacaactacttgcaatatctgtatttgcattattgaagtctgataagactgatccgtagaccacattttaagtggtgctgtcttagactctaagttccatgaggacagaacctagggctgctttttttcatcatcgtaatcataggacatggcattgaccgtcgcataacagcacattgattacatgcagaggttctgtcagtagcagtttctgcctccaaagtagcttggattagatcttgatcactgtttagcacctgtgggatcatcatactttacttataacagaaaataagaataaatgggatcatcagtctgatttatttttaaaatacatgctctttaatacaaagtctaaaaaaataatgttagcttcttggtgctggtatgacctccttataagtaaagatcacttgattaataatttaattttctttcactagatgtaaaaattctcttcaagttcacttaagtaaaatgaagcttaaaagaaatctaaaacaattagcctcttaaatagcaagactgtatgagagaaatgtgttccttgtacaagggaacccctgtaaaaaacaaaattatatttaaaacccaaatggctttctattatgcagctcagggagaaacattgaaactcttgaacagtctgaaattgtgtttctgaaaatgagaatcacatggagttagtttagcatctaccaatgtaatttctatgggacagagtaacatttttcaaagtttaaaatgtaagattcttaataaattacatgacagtgctgtttgaacataacagctctcactttcagtggttcaagaatgtcttctgaagtggtaggaagttgcagttgaatgttcatagttttcactgaatgcttcattatattaatgttaacagccaagaaaaaacgaggacatttactatatgtttttcccacccttggccacttagttttccgtggaacatttgttatttctgggacatacagcatgtgcccagaaccataattagtaacagtttgatgttatgggagttcaaaatttagtattttctagcttcattagatcagtggcttcctctgaaatataaaagcattatacaaatacgtaatacaaatacagatcctaagggtacattctggagtcagcttttttactcctttgctaactgcagtatttgcttgttttgatggggaggtgttcaaacagctcttccccagaaccagagggaggcactgctctaagtactttatatatatcaacttatttaatcattgcagtaacaggtgagaaaaaaaggggcaaaaagacattcatttgcccaaagtcacttaaatgggaaattgtatagtcaggatttctcctagggagtctggctccagggtccatgttatagcatacatagtatcttttatgcaatactgttcctgtaaggagatgaaggcttccagaattccactggtaaaatactgttgaaaaggttattttcttgcagactatctctgactaatgcttaggtagtagctgagaaatgcagaatgactggggaatgctgggtagccaggaatgctggataaatggggaaatgctaggaaccagggaatgctgggtaactaggaatgctggataataggggaatgctgggtaattgggaattctgggtagtcagggaatgctgggtaacctggggagaggtacaagaagtcattagttagcagctcaccctaagcaaccttctagtatctgtaaaccagagggttgttattaatacggaatctgggactgctgcaatgttgattatcctcacataagatcctttaaatcagtattatctttgaatcagaaggatatatatttgtagatgcgttttacttcaaatctttaactgtgtttaaaattcacaggtttctagcacttgctacatatacaatagctgagaggagacatttcagggaaagaatgttatttattaattcgtttattttttacttaagacttaaagactttgtgggggagtgggttagcagagagaacccttagtctttccaataggaaatttaccactgagttctcatatatatcctagccaggggagaaaagataaccacttttgctttgtactggaagtcatcggttgctgaggctgattattcaaagaaagcaaaacgtctcattggtatcaaaatgtagtttttcccatcttgtgttactaatgcagttattaaggactgaaaatgcaacattgcttagcaacatgcataacagtatttactattattttatttgagcagcagcagcaataagtactatgtcttgtaaatgtcctggtgacattttattttctttctcatctaacattacttgtatccattgccatggtattaagcaaaatgcttagtctgtggcttggcagagtgggtttagatacactcccttaagtacagagatcagccctgaaagctggcattggctcaatatagaaccaaaaggaaattaggcttcaggtaagaaaaagtagtaaaggatgcctacaactgtcatggtctatataagtcttctaattttcactaccagcaagtatatcatgatgtcccgtgagatgcaggaacttgctataatactgttcaggctatttgttttgttgtctccagtctttcaggcagcaactagtgttcataataatcaaaagcaaacataatccctatttcctcctaatgaaaagacagcactttgactaataactgtgctagcactgccttgtcatttatgcttcaccctgtgtgttggagaatgagttgatgtctgagaaaatttgatctgggtggactcccatccaagccctcctttcttctccaaattagaatagcaactatacatctgagaatctgggcattcctctactattttccctttttctttctccacagtcatcctagcttgacctcttaaatcctggtattctaacttgacttctgcctggggaagagcaagaaatcccagaggttaggaccatctagctagaaagactgtctctaaaagatttgaacaattttgagaggaaagagaggccaagcttctctcataaaaacaatagagaaagaatcagttcactactacaacagaggcagccattcatcctggagaggagagatgttccacttgggattgttatccagtgattgatgtcttttcaattccaggacatgtggaggttctttagggatttgaatcagtgagcagcttgtttaattctttgtccttcccagggaggggtcctgaatgtggacatcttcctcatgcagtttcggtttttggtgccttccacgtccttggctttgcttttgctttgttgcgtcttagaatcattaattaattatggatccagttccttctgtgcacttgctaattggacgttttgaaaaattgctccatgctggcttcaataatgaggagagaattaaaaggctgagaagtgctaggaaagagagacagaccacaatggtcatggaaatctagcaaaaaccatcgagatatctgttaccccagtaaccaggggacacggagcaccgagcagagaggttagaaaaaaggacaatgaagtgatgaaagggacagggtcagtgagggggcctattcttgagaagaatacttgcaaggagggaaatcctgtgtgaatggtgcattggctggacagcctgagctagctgttgcctcctgttgaggaggggagctcccggaacaggatgaagagccaggactttggagtccagcatcctgacatctgtgtctggactctgccatttactggctgtgggatgtggaacaaatgactttacctctctgatcatccagttcttcatctgtgaaatgaaaaataatagtacttgtgttatagtgttgtggtaaagaataagtgagatcaagttggtcagactgtctagactacttcccggcacatagcaaactctcagtactggctagtcattattattatgcagttatgttgtcaatttaatgatgtaataataaaatattaacataggtaacatacttagtcttgcatagctcaggacttaaaatactttgtaggagaatcattgtttccattgattcctctcctttctctttctggccagtttgttttttccgcttatacccctccctcctgttctacttaggaagaggagaggagttaaaaattgggtaagacgctgggcacagtggctcatacctctattcccagtgctttgggaggctgaggcaagaggatcacttgaggccaggaatttgagaccaacctgggcaacatagtaagacctcgtctctacaaaaaaattttttaaaattagctggatgtggtggtgcacacctgtagtccttgctgttcaggaggatcacttgagcccaagagttggaggttacagtgaggtatgattgtgccactacactccagcctgggcaacagagggagaccctgtctcagaaaaaaaaatttttttttgattaagaaaaacgcagctgttcgactgggggcctttggttgttgggatatagcagaagtgtgggaaatgctgaaagaggccatcacagcccagctggccagataacccatggaaacccttcccagtgtggatcctattatcgtgggccattacttatttgatatttagacataggtgatttgcaatttcagattctagattttctcctccattaaaatgtaaaccttcacaatggaaaagtttgttgtctcttttgtttactgctaattctctagtgtctagatacagctatcagctccacctttgggctgaacctcctgaaagtcctcaaacgggccttcaagttctgacacaatctcccccaccccaagttacctctctgattttatctcctactagtctgtgaaatctagctagatatattcaggagtagataagactgttggggcatatgaaatacatctagcagcaaaatgtagaaagatttagaaggaatcatgtttgaggtctaagttctagttctgctactatttcctggggtgaaactgggccaaatcatgtgacctttgtaggctttagcctccacactgaaagaattttggatcagggtgcttctaattgtaaatttaatggcaatgctatccttggttgtagcataatatgaagttgatttatccattcagaaacatttctgagtatttttggtccctggtgtgaaattgtgaatcttagcctggtgattcataggctaacagctgctttcccaccatctaccccaagctcagggctttgcaatgggggcggcagtatagccagaactgacatcatgtcccattcttcctaggtccaagtcatttccatcaagcagcatttcccaggcttttgtcattcaggtcccatctccatgatttttactatatcacattctatctatattattttttacttaatgtctttctttaaaccactccttctttatattttaccttgcatttgccctaagcagcagttatagctgtgaatagctttgaaattggatatgccagctatatttttttctaaagcacatgaaaataaatacacaaccataatccgccataactatgcaccactaaaactgtcttgagtaattccaatggtttgccttgcacactttgggaagcatcaccatgaaggtgagggacagagctctggagctttcaccgccttgagtgtccttcttccagtgatcttagaccttgggaggaaagaaaaagccattctcaatgaaaatctgagggagccctttccaaggcattggagattgttcactttattttgatttggaatgtagtgcagaaatgactaagccttcccaagaggccaagggctgctggaaagaagaaagaaaggtattttgctggcttaaaaaacagaagtcaatggcaaaggaacacgctgaagggaaagagcaattaactgaaataaaataaagcagcagaaaagtgagaggagtggtggggaaatctactgcagagaaatgcagttgcttgcagaagcaaagcattagtggaaggtaagagactttgcagagatcctcatttcctcctcattttggactttcggagtctctctctcatatgatgtgagaactgattcgatacacagaggggctcagcttggaggcccaaagtatgatattcttcaatacacttcctgctattgggatcatgctctaaacaggttagctcctccatgacatatagttttggcatgaaaggtggatctaaggctaccagagagaaagagttagaaatgagtgtagacttcctctagcatcttttcatacttaattaagaaagagaaggaacttagcctttatcatggtatagatttgattgacttaggcccacatatctgcaagggtcagccaaatttaaattgtaaacatgtttttagaaaatctgaattccccagcacgattggcttgagcgattggaaacaagatgcaggaccccaacacagacactgagtggaatgacatcttagacaagaagggcatcttacccaccaaggaaagtataaaagaatcagaagagaaggcagaagaggagcagcacatccttcagcagtcagtggtgacaacatacgaagatatgactttggaagagctggaggatcatgaagacgagtttaatgaggaggatgaacatgctattgaaatgtacagatggcagagactcgctgaggggaaagcaattaaactgaagaataaatttggagaagttttggagatttcagggaagtattatgttcaagaagttaccaaagccagtgagggcttgtgggtcatcttgcacctttgcaaacgaggaattcccctctgtgccctgataaatcagcacctcagtggacttgccaggaagtttcctgatgtcaaatttatcaaagccaattcaaccacctgcatacccaattatcctgataggaatctgcccatggtatttgtttacttggaaggagacatcaaggctcagttgatcggtcctctggtgtttggcggcatgaacctgaccagagatgagttggggtggaaactgtctgaatctagagcagttaagacggacttggaggaaaaccctaagaagccgattgaaggtgtattgctgtcttcagtgcagagctctgtccccatgaggagggacagcgattccaagggtgactgaggctgcagctgctatcacatgctgaactttcttgtgacaaattgtctggatttctttaagaaaaggaaaagcaagaatgaatccttctggtttttagttttgtataaattatgtttcaaatctttacattttagaaataataattgctggaaattctgttaaatattttggaactctttttttaaactatagtatttcctctaaaaaaattaaaaccagctattggtatggcaaaaaaaaaaaaaagaaaatctgaattccagaggattaaaatatctctgtttgggaacatctcccctggcacacagctgaagtaagtgcctgcagatggtcccagccctgttgaggggaactgtgttgggttctagcatgtattgtgctgggcccctgtcaaagccgatgagttccaatctagaattttgattaggaggagggaggtatgttaggagccaagtcagctgcacaaaggctgattggaaaaaaacttctgtattgttttgtgtctttccagatttttctatttaaaaatagtgcccattaagagggagtgctgatatcattaccatcctctccaaaagggggcaggaactgggaggctctgaggaaactaggtatggtccatacagcagataggacagattcagccaaaagacaagaagctcttggttaagctgcgccaggaatactatcaattactgtatcctgggatgaatttaggaaaaacctaagaattaaattgcgctcagagcacatgaattgcagtttcatgcactgtttttctagaacctcaactaggatatttataataaggttttggtttctttccagacttgagagaacattcatctaaaattacattttttcaggtcaatttcgaccagatgttctttagataactcatgaacgttctctctttttttggggggggggggtgggggcggtggtagagcatagtcccttgaaccctttttgaacctttttggtagatactgtttgtttcctcattccctctttattttctcttctctattctcgagtctctgtagaggctgacctgtgggccaaatcctatttctgcagatctttgcccccagtaaaacaaaacaaatagaccatctttcacttttcagaattttcaagactatgtcaatgctttgagtaagtcagacctttgtgtagaatacatgagtctcagcagcagcagtgatgagttggcctcttccagaagggaattcactgcatgggtgtgggccactgagttaaagtgtttcacagcccactttgctacccttgcctggttcctgaaatggttcaaacaaagtaacaacttaaatcaccagaacaacaaaaaaaagattattaagtgcactttcttttatgtgatttttattcttgtttatttgtttcatatgaactttatgtgaacaaagggatcttggtgagtacctgtacagccaaatcaaactttaacagaatcccctaagataagacagaaactatgggaaaaggttttcttattaggtatttgttctgtccattctctgaaatactcgtttctaacactgctctttagtaaggaaaaaagtcatttttctttatatctagactattgaagtcattatatttgtgatgggaaatttttaagtatgtgaagtaaagagagtgatgggaggctgagttggaaagaacacaacacctaattgagtcccctcttcgtctggtgagttagtattgtgcccatgctcatgaactagtgtattttctgtttttaatttcctcaattttcaaactgtaaaataaaatattatggtgtctgtttcctgggaacagaaaacacatgtaagtatttgagaaatttgagacagaaatttggtttgaagcttgtcaaaaagatacatgaaatcaagccccaataaaatatttttcttgcttgcatctagtttatcatgattggattaaattattctttgtaacacactcctgaatgattttataacaaatacataaatatgaggattaattaaatgccattatgctaacaatacctacaattttggtcattgcacagacgtgacacttaaaaattagtatacatgtgtagactttggtttaagtcttctattaaaacagtactttgagcttttattgttatcaattaatattttagggtgcccgaggcaagaggcagatggaacctgcagccctgcaccttgtcttcccttcccatccctggctctttgtggcaggactcccatgcaatcaagctgtattagttttctgtagctgctgtaacaaattaaccacaaatatagtggcctaaaaccatgccaatttattatcttgtggttctgaagatcagagtctaaaatcaaggtcccagcagggctgcattccttctggatgccctatggggagaatgtcttcccttgctttttccctctgctccaggctgcctacattccttagctcagagcccctttatctcatcactccaacctcttacttccatcaccacatctcctactcctgactctgatcctcctccctctctcttgaaagattcttgtaattacattgggcctgtccagatcatccaggataaacttcccatcctgagatccttaacttaatcacatttgtaaagtgtccttaccatagaaggtaacatattcataggccctgggaactaggatgtggatgtctttgggaggcctaccacatgtgtgaactctccaggcccacattgttacagctccatcctttaccatcactgcaccctacactagaactgttttgtctgcccttgggaggacctccccaggcaagggctcacacaggtcctaggagtggctctgttaccagcagagggtcttgactgcaatttgtccaggttcttggcattttgaacaaagaattagacaaaatacacagcaaagcaatgaaagaatgaagcaatgaaagcagagatttattgaaaatgaaagtatactccacagagtgggagcgggccatgcagtggctcaaggaccctggttacaggatcttctgaggtccaaataccctctagaggttttccatcgagctcttggcatataccccatgcaaatgaagtagtggcctgtgatcagtctggttggttgcagaaagccttgtttttggtctgtgcttctcctcatgcgtcaaggagttgccttctgcaaccaatcagaggctgaagtgaagtcacaaaattatgctcctatgcaaacatctgattggttgcagaaagcaactaatcaaaggtactttcaactttccatctgccaggcagaaatgggggaggtttgcaaagggagtaacctttggtccttttgttacttaggtgtgacaagttggggttttccttttgatttagttctaggaagtcagcgtgaatcagccttaggtgtcctgccttccgaccctattctcctgcttcagctcagaccaattgaacagggaattccgggatccctggtacctggaaggctgtcagggtttaggagaaggtcagtgcgagctcagtgtgggcacagggctctcagactccttgatgcatgaggaggagcacacacaaaaaaaggcaaaagtggggccctctaagtctagaggcccagagcaggggccagatgctggcgtctacaagcagtgttcctccaacagccaggcaagcagcatgattgaatgcctggaggtgggctgtggtcaaatggagactgtcagtccataataaaggaggcagtagaaatacagtgccagggaaaggggcccagtgttgctacatcttagcaaaactaaaaacctattttcattttgttttaaacaatgtgcaagccaaaaaaaaggttggcggggggcggggaccagatatggctcttagcccttcaatttgcaactgacccctggttcaaatgaatgagcacagcatacctaggcatagatgacattttattgaatgagtgaacaatgaacttcaatgtcaaattcagagatggtgcattaagtaaattacccaaagccgaaaaattcatccctaattatgtcacatttttcagtaggctcatcagagattcagcagggagataacatgacaactttaagataaatattaataaaatgtccacgatatggcaatgccttcaatttgtataaacccttttccatgataaatttcacggataaaaaataaagcctacaaattaaatccccttgccagtgaaaattccaaagttaaagtccagaggaattaaagtccaaaattggaagcttttctgtggagctaaaaatccaaaggaatcaaatttccagtcacaaagctgaagttcaaaattacttcagaaatttctaagaagttgcttcatcatcatttagtcatttgacaattatttatggagcttctactgtgcaccaggcactgtgctaggtcctggggggaaagcggtgaataagaggcaaccatgtccttatggagttgatatttaggtagggaacaacataagcaagtaaaatatgtagtattttaggtagtgatgattgctaaggggaaaaaaactaggaaaattgaaggtaggggcggtttgaaattttagatagaatggccaaggatagttccattgagaaggtgacttttgagaaaaagcctgaaggaaatgagggaggtagcctggcagatacttggtgggagaccatgccaggacgagggagtgccaagtacaaaggcctgtgttgggtgtggcctggtgtgcttgaggaacggtggaaggccagagtggctggagcagagagaacagagatgggggatagtagaaggtggtggtcagagcagagaagggagccagagcatagagggttcttaaggataagaactctggcatgtactctgagtaggatgggagtgcttgaaagatcttgagcagagaagtgacatgctctgacttctttaagtcagacctctctggctgccgcattctgaagaggctaaagagggtaaggacagaactagcgacaccagttaggaggccgtcgtaataccccctgggaatggctgttagtgttaaaatttggaggtagaaatggtggtaatgagaagaggttggattctggatcagttttgatagttcatataacaggattttctcatgtatctggctggggtgtaaggagaagagaagtcatgaatagcaccatggttttggtttaaacaaccagaatggaattgccgttatgagaataggaatgactgggaaggaaacagagtttgaaggaaagatcaagggacaatctggggacatattaagtcctaaacatctattagacatgcaaagtagatgagtaggtatttgaaggtatagatctgcagttcaggggagaggagccagactggagatataaatttggtgattgtcagcatgtagattttatctaaagccatcggactggataagatcacctggaaagtatgtgtggacagaaaaaagaagagtttctagacctaagccctggatgactccaatgtagagatcaggaggatgagggggaaccagcaaaggaaaatgagaacaagcatttgggaaggtaggaagaagaaatcattttgtgaaggtactgaacagctgtgtcaaatgatgctgggaggtgaggctgagaattgaccattggctttagcaacatggaagttaatggagactttgatatgagtagactcagctagactgatggacactcttgtgcctgagtacagctgaggctccttcaacaactctagcctggctatcatcctggaatggatgtagttctctcaagtactggagcactaggaagtagagtgagacacaagatcacccaagtggatcacttttgaatacgtctgaagagttgataattgacctaagattattatagaaccatccccatccacttgaaattaaaaataagacagtctgtggctcctaaaaaagtattttaggcacaaggatattccccaaaccagttatttattattgtcaaatataataaatacaaatagcagaaatacaatgacactgagtaaaggagggtaggtggagaaaatcttgatttcagttacaccaggatccagtaaacctaccatactggagagcatgacctgtgaattcacactaaatggaagaaatatcatatgcacaaacactaccactgcagccacccagaaagagagaggagagaaagagagagagaggagaaagggaaccccagaggatttccacacagtataaactctgcctccctaaagcacagactgggaccatgtaagtgttcatgtttcctgcaggcagttgacaccccaaagagaaaaattgagtgacgaagggctgaggctccacattcctagtttctattcccaaaggactgattagagaaaacactccttctcccctaggacagtgaggcagggaggagagaggctagcaatagccctcctggagtcctcctaaacacaaactcagggaaaatatttgacttctgtgcctcaaactccaacaaacacaacaggaaagggaattcaaaccattttatttgattggttccttggtataaaattgattgagaataatgataaatatgtctttggctacaatgaaattagaaacgtgagttttcatcattcaaaatctctcttattctggatgtagaatatttatgcacataatcttagatgtgcatgtgtgcatgtctgtccatgatcagggagaaactagaacccccttacttcttgttgagtccttgaactgtcccatctgctgatgagagcacttattataatgaaaatatcattctaaccaatctgttataaactcgtgaacaaatctgtgttgagtccttaagacagataaagattacaagtactctttgtccttctagaaaattggaacaatccagctgggcgtggtggctcacacctgtaatcccagcactttgggaggctgagatgggcggatcacctgaggtcaggagttctagaccagcctagccaacatggtgaaaccccgtctctactaaaaataccaaaaactagctgggcgtagtgttgggcacctgtaattccagctactcaggaggctgagacagaagaatcgctttaacccaggaggcggaggttgcagtgagtcaagatcgtgccattgcactccagcctgggcaagaaaagggaaactccgtctcagaaaaaaaaaaaaaaaagaaaggaaagaaaattggaacaatcctatcaggtcatataaaatatggcttttcttgtcgagtctttatgaagatcctgtttgttgttttgttgttaccttaaaatgcctgtctcacctctctctctccagatctctctcctttactccgttggcatttaagattctacttttccatggagccatccgtaattaatcccaccagctctcatcagcactggcattccatcactcacatgcactgtgtgcactgtggcttttgtaggtcatggtcctgctttgttgttggttgttgatatccttgtgtgtcgagtagacacatttgcacacagttagcctcttgaaaggaaactggaactcacaactccacaggtgacttgaagcagaaagttttgtgttctttgagccaccgtatagcaggaagtagacttgctttaagtgtcttatagattgattgagcttaattgaaatcatacacaggacatgtaaatgctttggaaagtatgtaatactatctgattacaaggtgctgttctgattgttggttaatgtagtttatttagttctctgttctgttgcatgttagaatcacatggggagatttaaaaaatctctaatgcccaggccccatccccttggaattctgagttcgttgctcagggatgcaaagcaggcatcagcattttttaaaggctcctctccctaagtgaaccacaaccctggtttgctgtttcttgccaagtaagtcttcccccaatggtcacacaactcactcctgcatttcatccagatctttgtcaaatgtcactgcctcagagagcccttcctctacccctttgtctgaattagtcctccccactctcacccatagctttctagcctctcaaagtgcttttgtgtttttcaaagcatttaatggttacctgatatgatattaatatgtggaataataaggaaatgaatttcattcagtgcaggaatggagacctgccctcccacagaagcatctctaaatttccaatcccctgttattttaagaataccaaccacagaatggaatgccagcctaaatccccctagctggtgggagaaggcagttgatgatagaggaagcctgggttaaaaaaaaaaaagtgagaaacatggtttaaaacatttcaaaaagaaaggggaggtgatagaggtgatacagtcttttttaaaaattgaaagcaagactttggcagaggccaagttggcaaatggaaagaaacctcatccctgcaattacagaaccaagatccggattgagtgggtaaatctagttggtcaaagaaaaaccccaaggttgataagaaaatagtcacagatgagatgggctccaatcttcctctataccacaccttgcaccatgagaatgattcccagatgaaagagaatgagaggtgatggagtgaggaggaggtttgggagctgggtgggagttctgaggaggtgagcacacggtgtggagaaacaggctctggggtcaacttgcttggatttcatttcagaaccttggcttttaaatataatttatttaacctcaggagctgtgaggacttacacacttgacttttcttcttgggccttcacttctgaagatgacagaaactcctgattcatttgggttgttgtgaagattaaatgaaataatatgtaaaagtttgtagcagagtacttggaagacagtaagtgcttaacaaatggattttattaataatgcctttttaaaagggagtgagctgtcagagaaagctggaaaaatttctctttagtcacatagcactcatcccagggagctgaggacagggcatgtgacctaacattgactcttccccaaatgaaggagggattttctatttgtccctgttagagaaaactagcatgagattaaatgataaatggcagcaataaaagtcagtgagaaatgtacacagctgtacttggatatttgtcatttttgaaaattttagttaaaattgagtgcctcctttattatgctattagatattaatcactagctactatttgcttgtaatttgaagagtttgctattagaaaaaagcatagcaaagtgaagcacatgctaaacattttctaacttttgtccaagactttgaaagattaagactaaggaggcttcatggatcgtaattaaaacaccattcatttggaaccagctcctaaaaaaaatgttgtgcctgtggcctcaaacttggttgagggaaatcctgtaagtcctagaaaatatcacaattgccgtaagtagtttattaattattgtgtagatttactttacataggaactgtgttcctgaaaaattgcaactaaaacaaatttttataattttattcatttctttattaacatattgtaatgtctgtgaaagtcaatcctttgttttggattgattttaagtcacagtaacttctaattctttgtcagacatgacagttcaaaacatgtacatgaatacttggtggtatcatggaatgcaacagtcttgtttactacttaagggcagcctggtgatgaatccttttgcagatttgtggaattattatgattattttaaatgacagttatataattgtaatataaatgattgcaaattccctgagggcaaggaaatgtatcttctatttactgcagcactgtacagtgaaaaaataaacagtacctggacatgaagtcgagacccaggaacacacgcagccttaacagctaacttatgtcaacaaggcacctacttttggtgaacattaattttctcatctgccttcctatcttacaaatgcatagggtctcaaatggaatcatacatatgagaaatgcaataacatgtgagagaacacaatagaaacctaaggttatcttttatagcaggtgctcaacacagagctgtctaatgattcattaccattggatatatttgttcttttagattgtaattttcatgtttacttttcttgaggtagggcacttgtatactttggtgagctgttttgtttttggttttttttttaatatcacatatatggtcttaaaatatttattttggtttgctcaaactatgtcttccaggtttctcatgaggtctttgttccctctgctcctcctacctgtgtgttccacccatgtttttagcagttctgtatatagtgtggtctgatagctagagccacagcggtctctcccaatataagctgagaaacgccactgactcggagggtggcaagaatttagtgagctccacagtcaacttcccgtggtccaggtatctctcagtttcctccccttcagctccaccgacaacccaaatcaagaggaacaaagttgcccatattagttttcttttgctagtgtaataaattactacaaacttaatgacttaaagtaacacagatttactatcttaccattctgggcgtcagaagtctaaacagacgcactgagctgaaatcaatatgtaggcagggctggttccctctggggactctaggggagcatcctttccttgcttttccaattctagaggagtgatgagtttttaaatatattaccttggcttttagatataatttatttaaccataagcttatataatttcattctaaatattgactgtattttacaaccagcttacaaaatttctaaaaatttaacattcagctttcaggggtcggtacaggcaattacagctcaccactgcctccatatttctaaacagtctgcatatactgctgtttctcgatttttcaattttgacacaatctccttatagtgtaagatgatgatttagctcctctcattcccccattccgcagctctccctcaattctccagtgcacaccttctcttactcccatcttcccaatataatactatcacaattatgggttaaaacaattttcactgtttatgttattatggttgactcattatagctaacatatgagccacatggatacttgtgatgattacatttcctttcttgtacaacttttttattctcctggacttaattgccaatggctacagctccaggagagcagaacaattttctcagtaagggtcaacatttctggtgctctagtggtttcttgttcatgtgtttcttggagctgtctttatggaactctctgctctcctgtgtcaatcaggagtgattattctctaaacctactacatacttttgttctgagaatccacttcatcatcatcttgggaggattcccctatttcttgtgttggatgtcctccatggccttcatgtccttgtctttccaagttttaatccttgtttttatagaacctaacctccggtagtttcctgaggcagcagcttaagaaagcatgtattggaggtaagttttaatacttgcatgtatgaaaagatatttgtcatggtccagttcttgatttcaatattagctttgaatataattcttcactggaaatcatttcctcttaacattttgaagacaatgttccatggtcttcttaagtacaatgctgcttttgaaaagtttcaaaaatgcaattctgatttctaagcctttaaaaaataataacctatcatgtatctctagaaacttttgaatctactctttatctctgacatcctaaaaatttcacaatgatatgccctattggggtctttaaaaaatttattgtgccaggcctttgggcaaacgggcacattcagtctggaaactcataccctttgttttgggaaatgttcttatgttactgttttgggaacaggctgatagtttctcttccagaatttctattgttcataatagaacaaggacatcttggtttaatgcactactcttcttatcctttctctctattcttcttcctcacacttcttttctttctttttatactatgtgtaggaaaatttcttaaattgtgtctccaaaattctttattaaacttaaaaaatctctgctatcatacgtttagcttctagaatctctttgttaatttgctaaggggtctttatctagcctcctattcttggtcatggatatagtatcttatgcctttctgaggctattaatgatcattgtattagtcagggttctctagagggacagaactaaaaggatatatgtatatgtgaagaggagtttattaggagaattgactcacatgatcacaaagtgaagtcccacaataggcagtctgcaagccgaggagcaacgaaaccagtccaaatcccaaaaccttaaaagtagggaagctggcagtgcaaccgtcagtctgtggctgaaggcccaagaggccctggcaaatcactggtgtaagtctaagagtcggaaagctgaacaacttgaagtctgatgttcgagggcaggaagcatctggcacgggagaaagatggaggccagaagactcagcaagcccagtccttccaacttctgcctgctttattctagccatgctggcagctgattagatggtgcccacccagattgagggtgggtctgcctctcccagtccactaactcaaatgttaatctcctttggcaacatcctcacagccatacccagaaatgatactttgcatccttcaatccaatcaagttgacactcaatattaaccatcacaattgttgaatttttttctgcctctgacattttttgtttcttccaagttcatttctcctcttgttttgttgcatgtttttctttggagattgttctcaagtatctggtcattctgttttccattcataattaagtgcactatactaacaagctcgctggaagctgtgtgtgcaggaatggagctccttgggattctccgtggggctatcatccagacacttgttcattttgttgaggaacccataaatatctgtactgtagacttttccctagggctattctatttcttccaagagaaatcctccagtattttgccaggctgctgacattctagatgctgagtacaggatgggaactgtgaatcccattttcagcctctggtcttactcccactccctgctgtgcctttcgttcagaacatctccggttcagtcttttgtgagtaaacctccagtatcaggctgggataggggaggaagttgcctagctgtggggtagagaagagtgtgttggaacaaaaatgctttctaactacctttttatcacccttcttgttttcagttccacctctcacctttattttcagaggtatctggtgcctctagttcctgagctttttctggcttttgaaggccaaatcattgacttcaatcgctgcagatggttaatttcagttttgctccactctatagatccaatgacgtgtgaaactgctttccattttctgaaattttgttgatatctctcttctcatgttatctcttcttcatcctcttttatgtgtgtaaatttttacattcctttactgtcattttattagagttgtggctggaaaacaataccaatgagtttatttaatttgccatttttaacatgaagtttgtatatatggtggtaagggttttgttgttttaatcaaattgctctccaaaaagactgaatcaatatctatcccattgacaatgtcagtgctcattactctgcatccttgctaacactaggtattataagtatatatttgtatctttgctaatttgtcaggaaatattttatatctcattgctatggtgaactggtttgcctggagctaacagttttctgggatgtggaatattcagtgctaaatccaagaaagtcttgggcaaaccaaaacaggttggccaccttattcattgctttaatttaattaacttataatttcccccaaaactctccaaagcggaattaatcattgatgctgaaagaagaaagaactctatcttgttctccttcttttacttccattgacttgacatctccccctgcttcaacaatcaccagactttgacttcctgtcctcttctgcatgcaaatctctgccttcttttcctctggaaatagcagagcaaatcaaaggtgctgtctggaggtgtgctagcaggatcaatggtattagcaaagaagtctgaagtccctattatattatttctttgggctttatgcttgaagactaaactcagtgaaaagtcagagttctgtgggagagagaagtcagaatgcctttgagtgagtagatatgcacatctgtgcctttttggctgtgtcagtattagactgtgtttgggataggagccatgctggaaattcatgccaaagagaaactgagaaattgtgctcccaaataggtcttattgaaactatctcagtcagaagaactgtgaatctaaaaggagacagagttggaggaggaagatggacagtgttatatgctcagtgaaagttaaaatctgaagcaaatcttaacatcctattatttgttcactatgtttctattatacaaccttatggtagcaatgcttggttcataagcaattctggaattatcttcatttatttacttagtggacacttgggattagaggtaaaggagctcacagcacggtggggaagagagtcacatatataatacactagaggtattagtgaagtgctgtgagtgtatttacactggaaggaattagtttacctgaggagtggggaagagagtcaaagtagataaggctgtatcagaggtgggcatctgaatggctcctaatggagaggcagcaatttgccaggagcagaaggagtcaggacatcataagcaacctgtgtgtgtgtcatgacgtggcactgtgaatggctatgatgtgtttgaggactggatctggctttgtggagagcagcaagctatggggctgggtaagtaggatgagcctggtttccaggggctgctttataccttgctaaggaggaggattttctaccatagaggatattttattggctcattaagtataccataagttttcatattcatataaataagctctgatattttagttcacttagactagcagttttctttttttttcttaatagcagcaccatttcttcaaataaaatcttacacgtaaggccatgtagaaacatgtaagatcaggctgggcgtggtggctcggacatgtgaaaaatgacagtaaaggagtctttgcactttgagaagccaaggtcggcagatggcttgaggccaagagttcaaggccagcctgggcaacatagagaaacctcatctcaaagaaaaatataaaagttagccaggcatggtggcgtgcgcctgtggtccaagtcactctgggggctgaagtgggagaatttacgtgagcctgggaggtggaggttgcagtgagtcaagattacaccattgcactccagcctgggtgacagagcaagaccctgtcttaaaaaggaccaaaccaaaccaaacaaaaataaacaaacgaaacaagagacaggtaagatcagagctgctgtagttgatccagggttggggcttagatcccattcttcatcttttcctcttccaaagctgcctccagggaacccctggtgtcctgcagaggtgagtctgaaacccaccaacagcctgagattaaaccctgagggtgtcacagcaagatgtatgagtgttcatgaggatatctatatttgatcgtctctggacttcaaataaaggaagggaaaatgattactaagaccttataattagaagcaaataacatgacatcaacaatacaattgctatgttaagagattgagcttctaagacaccactgttttttatttctgtctttctggcttctcattgttggttctggggatcatccctgttccctctgatttatgtcttatgtttcatgctttctcttcacccataatgtcattttccacctatgcacttgtactctaccttccatctgaggccctgatgcatctctgtcaagatgtgtgatgatcattgcaaattcttattatcatcccctctaaacttgagattcaatttcttgagtatatccatgtctttaaatgtagccatttctatcaggattgactatattatgctgctctaacaaacagccccccaaatctcagtggcttattgaaactaaagtttatttctcactcacatgaaatcctctatgggtacaaatggctctctggagttgctcatttagatgtgcactcaacattctaggctgcctctcatcttatgatgattcacttccaggagaaggtaagactgagggatctcacatgagcaatctagtgctctggcctagaagtgacaaatatcacttctgctcacaactcattggctagtgctagtcatatagtcctatccaatagcaaggggatggggtattatcctcctaagtgtctagaagagaagagggtgtactccctctccattacttgcaactactcttcttcctgttagggatactggtcccatctgactgcctgacacttgctcattcttcatgcttgtttccacgtgtcttctctgactcctcttcttcctccctccgctcctcttcctccccagcaacctcatcaggagactctgacccatgtgtccaagcactgtgctcacttctaacccaaccctgcccttgctgctatatttgtgtgggcatgccagtcttccccagttggaccaacacaatggcattattgatctcagtatccctagtacctaatagtgcatgctacttgtaggtactcattgaggtttattgtgtaagatgaatgaatgttgcaaattcctaaacatgtgattcagatgcccaatcttactctgttactttatgaaaattttttaaagctatatgatgttatatcaaaatatgttgttatactttaggataatcggtgtgttagccctgaatttcagcataagtcccatttttttccatgggagtctaggaaagctatatgtttattcagcagcaaaatacagtttggaacttaaataaactattgatcaatttctggtcttatgctagaaggaataaagcatcaagaaaaagaaaagatttgctgtcaagaccaggaaaatttgacaatagagtattagaatgcaggaaatgaggggaagtggaaaggcagcaagtaggagagaaaaagtgcagggacagtagaaagtgaatgtaggagctttctgacccatgcacttcaggaacgcaattcatccctaaaatgctgtttgctgtcttaggttgcaagtaaccaaattaaaaccagtttgaaagtagagtgagacagctgtcatcataagagtcatttgatctgtttaaaggtggctgcttgtatgcagggaccaacagtcatgtccagggcagcagctggtgcacacttcaagcacagaccataagagctaccccaggcagcacctgctaccaatagtgcaaacaactcagagagacctcgttggcataagggaatactctctcctttctgagtaaagagcaagtagaactaaaggtttcacattttaaacatactttacattcctcctcttctggggctcaagcctacttttgggccaaagcggatgttatatctgacatagagtcctcggagcagcagttgttcctgaaagttcctttttgcatctttgtgcctcatgcagtggcttacaggtcaaccagacttctcccctgacttttgatgtgtaagagcttgtgtttcaaatgggtttggttttcttaatgtcaccctaggttggtggaaaggagagtaaatggaaatggggggagcagggtcccctggggaggtttaaacagatggaagtcaattgtctcttgagaatagaggaggctattgagttttcattccacactctgctcctgttctgtcagcaaagaacaaggactactctccagcaattgctttccactggactcccccaccccggcctccccacaaaaacctagggatcaacttagttcactccaaattagaaaatttaatagtcatttgtttcttcttgtccacagggagaaccattttctttccttctttcaaaattgcccaggtcttgtgaagggttattaacaccagaaagaaatacattttaataagcttaaatctcatttctacatgaaaccatcagattttagtactgcaatattttgatccctctgtcttttaggctctgacaccaaaattgccataatgaaggtgtttcacttcttctcatttatttttatgggatcttttattcccaaatgccttttcatcccagccaaagggagaaatgttgatagatctgccatcaagaaggttccaaagctggcctgtcaggttttctgtttccttgtttattatctttgaacttttgttttaaatgttttaaacacttatttaccatgtaactaaatgcctgatagcattgaaagtactttatgggttttaatttatttaatgctcatgaaaccctatgaggtaggtactgatattatttttattttactgatgaggaaagtgaagcaaagagaagtgaaatgaaaggtagtgagtgatgggaccagggtttggacatgggcagtctggctctaaaatgtatgcttttaactactatgtaatgctgcctcaccaacaacttgtctcacaaattgatattctggatcagaggatgtcgactggcctgcaaatgtattttgtatggctcatacacagttcagaagttttaaaaatttacatagaaatctgcatttcctgacttcttttgaaaatgggaataccaaacatcattaggcttgaattcccaatacggcaacaacagctgagcaacaagcagctgtttagactaggcactcgctctccaatttccacagtccccaccaatgcagatcatagtatcgacttaaatttcctgcctgccttagagaagcttctgagcttgtgacctctattctagctgctctatgaatggacgctgccccagtacagcgaggacctgctgcaaaatgcatttcttagtcttcaatacttattcctccttgtaactggatttctggtaagttatgtctcatggtggatctgccccaaagatggagactgaatggcagtgagtcactcgccctggcctccattgttctggagaaggttccagccacatggttgatgtcagctggttttccagagccagagctgggttgcaggacagacacacctgcatctaatagtgaaaggcaaagttgaaaggccaagaccagcctgaggtctgagggaccaagggcttcacagaggccagaagttcagaggtggacataaaaggtgttaggagaataaggaagtgaaaagaacatagtacagtgtatcagaggaggagctccaggctggcaaatatcactccctcgagaaaagttactgcctgtctgctgaattcacacttccttatccaagtgtctcagtccattcaggctgccgtaacaaaatcccttagactgggtaatttacagataatagaaaattattgctcatggttatggaggctgggaagttcagttcaagatgccagaagattcagtgaggtgaaggcctgttcttcattctcactgcatcctcacatggtggaaggggtgaattgtcctcatatggtagaaggggcaagaatgtacccttcatccagttttataagggcaataatcccattcatgaaggcagagccctcatgacttaatcacctctcgaaaagccccacctcttaatatcactataatggaaattagagtttaacataaattttggaaggacatattgagaccatagtaccgtacaataaaatcaataccccagcttcatggagctgttgtaaagattaaatgagatagtgtactctaagtacttagcatgcctggtgtgatcaatgctaacccaaaggatccaggaggtctcgagtggctgctaagaatactaatgggtgtttgcagtctgcctgtgtgcaaaggcaggtatggagtagctggggtccagtcagttctcagggggcaaatccaagacagagtttgattattcataaccttaacattgtgttgccatcatttattttaattttcagtatatttatttatatttagtttttagtttcaaaagtaaatatgataggcaagagagctagggtaggcaagagagctagggtaggcaagagagctgtgggtgacaatgctaaatgcttttatcacacttactatttgtatttttttttttagtttaatgagaatgccatacacttccctctctctttacatctagaaatattgtatgaacaatgaattcataagatgcttgcaacttcagttgagctaagattttgcattttgttatttcttcacttcttttctccctcactccctttcttccttacagaaatttatagatttgtcttataatctagttcagcatttcccaaaatgtaagctaaagaacactaatctcgtaagattctccagggataacaggtttttgtgatcaaataaatttaggaaatgctttatatttcatctcttctttaagatttactaaacatgttgaaacattgataaggctttcagttgccttgaagtaaaacaaaaaccaaaacaaaaaacacagaacatttagtccaatattttctcaaatgcatttggccatgaaacttttgctttcttgagtaaaccctattaacaccctgctggatccaactggacaactgtcaatctgggtcttctcattaaatgactttctaaccttggaactggactgattattgttactgctgctttcattaaaggtgctacattttatatttatagatttatcttcctcccaaagacctaacttaaaaaaaatcagaagagcatatcttctaccctctgcttcatatatactgtaattgaaagtgtaaggatacgtcatgagaaagtaaacatacaacacagtaaaagttgttccaagtatttaaaaatgttctatatcttctaccttattatggctcaagatatagtaacttttgtggggttttatcattgtttttgttttattttgtgaaaacatccaagagcccgcaacagcctatagatttgcagatccttttctttcctgggtagacttgcattcaaggaaaacattaacctaacacaagttcttctttaaaataagtgtgtagcgatctttttccctcacaggctctgcacatacttgttctctttttctctcatcatttacttacagaaaataaaacctgttaagaagcagtttgttctatgttaggttcgtttatacagcaggcgagcaggagatggtgtcttggaattgccttgacacaagagtcatctgggttctgcttcatctaaggagtgcttcaggatattagagagctgagagaggcaatcccagatcaagcgagaattttcctttgcagggtagggactgatgcccgggcctgtgacactcctttggctctttcagaggcctcttcagtgacatggactccaaagcacagtgactgatctttctggataacacccggcagagctagacttaggtacatgctcagtccagagccctcttcagatgtgacaagggaatggctaatcagatgtggaaagtaccttgaatgaatagtcagtctggggagtgggggaacacctcttaaattggttttattgaatgtagaagaacttcctgaattctgtgaatggctggggaaacacagggaagggcccccgtcttcagtgtgaattcattgtcttcccttgctcagagcccctgcctttgttgtagctcttcctttcaaattcaatgccagtcatggcagcaaagataaaagaagttagcgctagcttgtctctgcttgctcgtaattctgttcagggcagatttatggaatgaatgattctttccatcacagttggctaattttagaaagattagaatgcaggagacttccgttcctatgctaatacagccaggcaagttactaccatcatctggctgtgttaactgaattttacttttgtgtctttctggtttcctatcggaaaaatgggcagggaaatgaagaccatttacagagtgacattaggaataatggaaaaaaattgattacagaccactttacaaattcatagctccgtatttatgctatgaatcaacatgtaatttttatcttataaataaccaaggtagtcacaaattcctagtgctttttaaatcagataccaaattctatttttttcttcaacttttattttaagttcaggggtacatgtgcaggatgtgcaggtttgttacatagctaaacatgtgccatggtggtttgctgcacagatcatcccatcacctatgtattaagcccagcatcctttaggtgttcttcctgatgctctccctccccatccctcacaggccccagtgtgtgttggtccccccacaatgtgtccatgtgttctcatcattcagctcccacttataagtagaacatgcagtgtttggttttctgttcctgcattcgtttgctaaggaaaacgacttccaactccatgcatgttcctacaaaggacataatctcattcctttttatggctgcatagtattccatggtgtatatgtaccacattttctttagtctgtcattgatgggcatttgggttgattccatgtctttgctattgtgaatagtgctgcaatgaacatacgtgtgcatgtatctttataacagaattatttatattcctttgggtatatacccagtaatgggattgctgggtcaaacagataccaaattctattcatttgtcttaaaattcttagaagcaatgttgtagaacaacatattccaggctgaattttacctttcacttttctctgttattactagatacatgcaaaaaattgaagttaatattgtaaatcttatcctttaaatggaaaacagagaaggcactgagttagagaaactttaactttcaagagccgaaagcaatcaaacattaaaaatcttaggaccatttcaatgtgactctccatataaaacccatagattatgggaatcatgacctcttcttttgtaaatataatttccctaaaattagtatcaaacacttttaggtctggaaagcatcttggatatggatcttctgaggggtccaacagcttcttgctgtatctgtttgagagttaatagctcacctagaacttagatctcctaaatctccagacaaaacttttttcaagttttctcttgtttcctcattctaaaattattttatagtatccaagccacttcactttccacctttcccttcctattctccccataaattggtccctgtaactccctgctgctccgtggagaccctgaggtgccataggaaaaggaaggttgttagctaagcctctgagctctctacaacttattgaaccagaatacctcaatttttagctatttttcttatgatgctttcctgagataggggctccatggcttgaaaatgttttcaagccactgttctccccgaccaaaaccacatgcttgtctcattcagtgttcctcattcaacccccaaagtctctttatatcaacttttgtaaggtttgttccttctcttttcccttttgtaccattccccatccctactacagacctgaacgcttcccagcatcttcttttcaagggccactgttttttacgagcgtaaatgcctgaagttaaactgtcttatctaagatccctaagttcagcctcatacctcaactccacactctcttccctgatctgaatattttcaaaacagctcctcaggacacctgggaggtgttctggctgccataaaccttaagtctccttgggtcccatgttcacccaggagctgtgtctctttcctgtcttcaaagctgcaccaaagctctttgagggtaggaaacatatattttccattttcacatctagcactggtttttaacatggtaggtgtcttagttaagaatttcattggctaaaaataacatggacccccaaacaatagcttaaataaataaatgaggggctttccctttctcatataatcagaggtctagagatggggagtctggagctgacatgacagccatgatgccacaagggacccaggcacctctgtcctctcaagcgtccttggcacttgcttgtcaactgttgtctcaagatggaagaaccccttctagaaggcatcatgtccatatcccactaaagaagaagggaagggcgatcctgttgtagctcatgagcgtgataattgggtgttcatgtgcgtgtgtgagatgtgccaccctctgaaccttgttacgacattggcacattacctgtctgacctgacttggggaaaaaaaaaagaagaagaagggaaaggaattgagccatttgtggtggaaaatttgttggtgaaagacagcagcaaagcaatagtcaagcaagcttctttaacggactttctagaagtcccacttggtgacatgtacttacattttattcataaaaactgtgtcacagggacccttctagctgaaagaagtctggaaaatgtagtgtttttaaggctggatatattgttaataaaattggtgttctgttggtaaagaagaaagagatagtagatatttggtgacaacctgcagtctctactggaataagtatgcaaaaatactccttgtggctggaatgggaaatgtccactcccaccatgatcgcctgtgttgagtacctggaagagtggttctcaaaatgtggtcccagaccagctgcatcagctgagaacttgttagaaatgcaaattcttcagcctcagcccagacagtttgagtcagaagtaggtggagtcagtgatctgtattttaaatgccctacaggaggattttaatgctgctagagtctgaggaccactggcctagaatgatcatgcagaaagttctagactctcatgctctgcttgtctcgacatcaccagagtggtctgggatgtgttggtggccaagataggcactagataatctttacaaagcaatttaagttcacccaaatagagctagaatgatccaggttcctgatgttgctgggtgtagggggagcttgaagaaaaactggcatggaagtagaaccaggccaaccaactttaacatgccaacaaatgccagaggctccttcctctcaaaactatcttccattcttctcagttgaagggctttagttgccaaacaaaaagtattactctaggatcttgcaattaaagattatctgagatgttggcaagattgtggagaaaggggaactcttgtatacaattagtgggaatataaataggcatacccattacggaaaaaagtatggagagtcctcaaaaaactaaaaatagaaatataataccatctgatctagcaatcccactgctgatccaaaagaaaggaaatcagtaagttgaagaggtatctgcactcccatgtttgttgctgcactgttcacagtagccaagatatggaatcaacttaagtgttcttcagcagatgaatggataaagaaaatgtatatatacacaatggaatattatttagccatagaaagaataaaattctgtcatttgcagcaacatggatgcagaacattatgtttagtgaaataatccaggcacagaaagacaaatatcacagatactccctcctatgtgggagttaataaaaggtcatcttatgaaggtagagagtggaatggctgatagttaccagagactgggagtggtggggcagaagagggtaaatatagagagggtggttaatgggtacaaaatgcagttagatggaaagaataagttctatattgttcaatagcacagtagggtgactgtagttaacaataatctactgtatatttcaaaatagctagaagagaagatttggaatgttccaacacaaagaaatgataaatgttggaggtgacggacatcccaattacccagcttttaccatgacacgttgtatgcctgtatcaaaatattacctggaccccataaatatgtacagttacaattacaatcacaatcaatgaaaaagaaagagtatttgaaatgtataatccttgagcttcaatgggaccaatagggatggcttgtgtggagagggttgtagtcatcccataatatccatctgcttctcccccaagtaacccataatgaactcagtacaattaagtataataaaaagtgcacacagagcacatgcagctttaagttggctcctctggcccagggctcctccaagcatggtccacaggcagatccagcctgagaactctttgttactggtctgcaatgagataaagaacttaaatccaaatgtaaatcaaatacattactgggctcactctttagttcagctgacattttttcaaactaagactttctcaaagaaattagtgcacaacaagaaacaaatcgttcatagactgactccttcgagtggcactgcccctggctcccttccaactagacagtcacctctgcccttcatggagattctgtagctgccactttaagcatccttctgtccttcatttctttaacaaacattaattgaggtctatggtatactagcacagttgggatgctgggaacacagtgggcaatagcacagacaatctgtaagggtacaagttgacatcaaatggcagtatcagatgggacagtatgtgtggaagtacttcataaacctaattatacttaagaattgggtagtattctctttccttctttagatggaataaaaggtgcaaagagaataagcaccctgcacaatattgctagaataagaactcaccgctctctggccactagctgaatttgcttcactttttcctctctctataggggtctcatctgaaagaacattgctcttgagcttaagaaggcaaaagaatttagagggtcaggtgcagtggctcacacctgtaatcccagcacgttgggaggctgaggtgagaggatcacttgaggccagcagtttgagaccagctgtggcaacgcagcgagaccctgtctctacgaaaaataaaaaaaattagttgggcatgatggtgtgtgtgtgtaatctcagctactcaggggaaaatgaggcagaaggattgctagagcccaggggttgaagctgtggtgagctgattgtgccactgcactccagcctgtatcaaagagccagaccctcatctctaagaaaaaaaaaaaaaagaatttagagttgcatttcagatgagaagcacatgatattgacaattcagttcattcccaacctctttcattggtgtctgaacataaagccatctcagcatatatcatcggaactcaagggaaagtggactaaagctgcaggtaatgaaaattactagtaacttggaccctagtgggatgccagtgagaatatgcacttccacaggtgcttgaattctcttggcccagggctttaggaagccacaggaaaaggtcaggatgttcaggaatagggacgtgctgtcagagaaggatggaagggtggaagagaactgtgctgggcctagcgactttaaaaagactggcaagccagtatggcaaatgttaacatttgttaaatctgaggagtatgcatgtgggtgttttattttttctctgtactttattttatgttttaatatttcataatttaacatttaaaatttttaaaaagatcctcagccgggcatggtggctcgcgcctgtaatcccagcactttgggaggctgagtcgggtagataacttgaggccaggagttcgagaccagcctggccagcatggtgaaagcccatctctacagaaaatacaaaaattagctgggtatggtggcacacgcctgtaatcccagctattctgctccagaggctgagacacaggaatggcttgaacccaggaggtggaagttgctgtgagctgagattgtgccactgcactccagcctgtgtgacagagcaagactgtctcaaaaaaaaaaaaaacaatttttaaagattcatagaacagatcagatgatcaatgtagcacagaagaagagaagctgcagtaaataaaatattcatggccctaaaattatgaagggcagagatagtttagttgtgtgtgtgtgtgtgtgtgcatgcacatgtacatgcacatactcagaagctttagcttgcatcaaaatcccctggagggtgtttaaaccacagagtattgactccgtctagttctgattcagtaggtctagcgtgaggcctgagaatttgcatttttgagaagttcccacagcaaatcctcatgatatctttttgagtagatattgtgtactcttcctacaattacctggactagtttgactcatttattcaacagatttttagtacttacctactatgtgccaagtactgtgttacatgctagggatatatggtttattgtgcacatataactccttatctagaggcaatcgttaaatacatattatatgtttatgccaaaaggtgagcaatcatctaaacccttaagcaagctgttgggtattgtaatagctaatcagtaggataggggaacaccatggggatggctgtgtacaaaaactgcttttttatgtatggtatttcataatgaatacagataactttctttttctcttctcatcttccccccaaccacctcctatttttttctctcctttctctctctctccctccctgggatacacatggttgatgggctcatccaacagctatctcaagccaccccttgctgctgcctgttaccagaggttctgaaaagccagatatttgctctgccagattcactggcagctggggctggccacatgccctagttttggctaatgagatataaatggaaataggttgggggccttttgggaaagattttgcttctatacaagaggacagaggtaagaggaagatcactggcacagcccccttccctgtcttcctgccttaaggctgcaatagccatcttgtgaccatgaggcaactaacataaggataattccaaagggggcagagtgacagagactggcttttaatgacatttttgaccaattcaaccaacattgttagcacaccacccatattcagacttgttagtgataaaagcaaagctctattttaatgaactgttaatttctatcacttgcagaggaaatcactcccaactgatgcatcccattctccctttcttcctcttcttgtttttttttccttttttattttccttctctccttggtatgtgtgaattgtgtcctccttgcaaattcataagttgaagtcctaacctccaaagcctcagcatgtgactgtctttaaagaggtgattacgttaaaatgaggtcattagggtgggccctaatccagtatgactcgtatccttaaaagaagaggaaatttggacatagagatgtagagagggaagaccatgtgaagacacaggaagaagacagacatctacaagccaagggaaagagacctcagataaaaccaaccctgttgacaccttgattttggacttctagcctccataactgtgagaaaataaatttctgttgctttagccacttagtgtgtggtactttgttatgggagccctgctgagcaaatatacttctttctcctgcctttcatttcccccgtattctttctttttctttatttgtgtggatatatatatatctccaaggggtagcctagagtgaggaatcccttcattagggcccctcagcagacttcttatgtctccttggccagaattatgttgcatgctcatatgtaaaccaacatctgagaaggggaatggaaccaccataattaatctaaaccagtcaagattcaccctctttggctggaatggaagctgcctttcttacagcttatagacgcttacagaactttggggacaacaagactataagcagggttctgtaagaacaatggttatcagcctaaggcaattttgcatctgcctttccccaactcaaaggacatttgggtaatatctggagatgtttttgattgtcacaacctgggggaagaggggagttgctattggcacctaatgggtaggggccagagatgctactaaataagctacgacacacaggaaagtcccctacaacaaagaagtatctggcacaattgtcactcatgcctggattgaggaaccctgtgttagaggaagggaagaaggggtggctattaggaggacagcaaggggtgtttgtcatggatggaaaaacacatgtacgtgatgttctcacagcctccctgtgagtctcactggcttcaggccacagcatccctgagtgacagaagctggtctcattacattggccaaccagccctcagtctacaactgtctgtcagagacccagtgaattagaaagatttgtgcagactaaaattagaaaagagatgaaaagtgattatttggaaataaatttgaatatgcctatttagatcctccaagactgcagtctgacatataaataagactaaaaatatgaaattatggtaccctgtcattctattcactagatttcactagctctgaatctaataaggccttagtcaccgtgttaaattaaagctttttaatatttaaaagatattaataatcttgctttggtaggttggtaaattttaaatttaataatttcaaacagtagctcttcaagtattcgaatcaatgattttttatattcacttatcttgatgttttgccataagtaataaatggtgtaataaaatgtctttgcgcttcaaataatacctcagcactttttaaacttctttgcaaaacttgaatacagtttatgtatgtgagtgataggcacacatatctacaaaggtggctaaattttaaaaaattaatgccatgacctgcaatttcctttgcaaatatgtagcttgtcctgcttgctttatggctgttgtttgcaacatcatattttccccttaaataaaaaatttaaaaatgacatagaagactttggccaaattggctaacagtttcatcatgtttgatattggttccaagttttcatgcacctacttttatatatacgtaatgtatcagcttttgatatagtaaaaaacacataggtagcttaaactgcaaagcattttctgtttttcaggctatatattacaagacctaccaagcagcatacttgcttaaatgttctgtacttaattgtcagagtttgcagtggactcttcatttcttaaagaattaccacaaatgtattcacttattcagctcctgtgtgtgcacatacatttctatcactattttcttttcttcaatcagccagtgtctagaagtaagaaccatcatctttaattcaatctctggcttattatagacctaggatcctcacaggaatatttgttcaatttgaacatgctcttcagctgtgtttttttttttttattttgttgcttatggatgacagataatgatgtttttacacatttaagagtacttcatttccttattacatggacatatttctaattggctccaggctccttactattaatagctgttgaagatgcactatacatctaatttagcactgcctggggtgacacaattggttctcagttactttactgccaatatgtacagctaatgccacagggagcctggaactaattggtgagatccttgccctccgagaccgaacctaacacatgcttcccagacagcttccctctcagggacttcagcgttcctcattaccctgaccatctttgatttggtgccatgattgacataaggaaggcaaaaccacctcctcggcttgatttattctaaagacatttgactttatccatacccatccctgtggaatatggaagcccttggggtgactcctgaatttccatataggagcttaggggtagcaatatagaaggccaggggcttgaatgaatgtatgtttgcagggaaaacatactttgtttcattttaattgtattctttagtgaggaggttgatggatatttggttctggcagggagtgtaggctccgtaagtcaccctttgcaccttggcagagccacaggttattctctttgtggaaagccccttttggtgccaccactgaaagccaaacctcttagtatgactttaaggagtatgacatcaaccaatcccttgagccttacgttccacctctcctgccaccccaacctcccactcagccaaactgcaataattccatgaacaggacatacagcttttttttttccctcttctgttactttttggtgtccccaaggtctagatctggccctctctccccgatgccaacaacacttcctgcacaccactaccatcacaggtcgggtgtggaattccagtggttcaacatacagctttcctcagtgcagactgtgaactctttgaaggcaaggcccatatcttagtcacttgggcatcatgagtacccaggtgggttctgacatttgactggcactcaatgaaaatgtattgtgttaagctcttattgttactatggtattctgtctttatcagcagaagagaaggagagtttccccaataacatgggtagttgaaacataaccctataaatgctgaaccactttctggatgaaaaacatctcaagtctctgccttagtaacaagatctaacatatgttttacttcaagactcaagaatatcattgtgaacattggttatgatactgacctctgatattagcagtgttgcacgtcctatgaaagtgccctgaaataatggtgtcaaccaatgcaactttaaataaaacatacacactgacaaaaatcaaaaagcatgagtccacccagtgaccttccagtgaagcaccaaaatttatttcatgagacttcaatttcaatgattgaatgcaggtttacttggctcacaaggcagctggaatatatttctcttttttcagattatttactgtgaacttcttagaaaacccctgttttctgtttctggaaagtattaatattcaggatggaaacacttaactgggctgggcacggtggctcatgcctgtaatcccagcactttgggaggccaaggcaggcagatcacgaggtcgagagatagagaccatcctggccaacatggtgaaaccccatctctactaaaaatacaaaaattagctgggcattgtggtgcacacctgtagtcccagctactcgggaggctgaggcaggagaatcacttgaacctgggaggtggaggctgcagtgagctgagttcgtgccactgcactccaggctggcgacagggcaagaatccatctcaaaaaaaaagaaaataaaagaaacacttaactattcaatgactacagaaaggttatatgaacttgatctatattatatttgtcatgaaataatttttcacctcctttagagaatcaggttgttgtcacaacaaaaatgttatattaatacactgtattaataatagcacactaaatgattttgtctgtcttttctctaccctgtcattcaacaagtacaatttgctgtgtattgtgctaagtaagatctgagggagtaggggtatataagatagacatgattcctgctcagggtcttcatgtttaaagaggagggacagaccaacaaatagaattgcaatatagaatgtttcaatgttgagactttcaccagcctataaaacataggccacctttaccatcacttgaaattcctacaaccttttcatcaccagttcaagagaccatcataaccttgactagggcccagggtattgctctggtggcaggaatcaggattttaataaaggtccatagtaatttccctgggcatggttatttttggtgttttgtggtagggttgtagggctggctaaggttcataagatttatatttgtaatctcagtggcctgtatgtggagaataatggtgattcctatcagtggtagtaggtggtagtcaccagcagtagccccagtgggaaagactgtgtctaagtagagaacatgggaagtaattactgctgctggaagttggagcagaagtttctacttggagcttttctggaaacacgttttgcttattcatcaaaatatgattgaactgtgtagatatccaaatgttgtaaataacggaattaaatggtttgatttatgcctatgtggtctttgtcacatgtcacttacactatttatttgatatatgttatttgtagaaaaccgcactagacactgagaggactctgttttggtctcagtgggtttacagatcaggaatggcatcaaccaaggacacagggcatgcatgttcaaggtcacagggagagtgccagctgtgaatggaagtagatttaggttcctaatgagaaaacaagagtgttgtgtaggtctgttttaaaaactcataccagtgaagtgattggcaatggagagttcccctaggtctgagagcaggaagaagaatcctgtaaccctagcaaagcagggtggttgatattagctggtgctgggcttaagaacaactgtcagaggttacattaaaaatcaaatttattatagatttttgagatcaagattacctacattaaatatggaataattcaacttaactaatacttatttagaatctatcaagattctctttaagccataaggaatttcctcttgtattcttctacatgaatgagactaacataaaaacttaaagtctttctgacaatcacaaacagagaattaggggattgggccaacctcattttgcctttttaatggtgatttaaaatttattggtaaaaaattgtcttactgaggaatgcacagacttcttactaagatcgttctagtcttatggagtaatgatagcatgttagaattagaaatgagtgatcatctttattagggggttttaaatgttgtttagccataaaatcctttgtctaaacaaagttttacactgaactgtggtatgtcaaacagacaaaagtggagttgggtgtgggggctaatccttattgatttactccagtcaaatctcaaagggatcccccagagtccccagggattccccaagacacagaaaactgcaactctgggtcattttccacatttcataaatgagagtgccaaggcccaggacgggtaagtgagtctctgcatagtactgcttgttagaggcggaaaagggtctagggtttttgacttattttggcttatttcattgagcttttttctgaaaacctaacacaatttgtatatcttttcatttgtgtttacaaatggcaagtttccaagttaagcttctgattggtttgtaactgaggaaaagagtgactgctatatcctgagccaagagagaaatgggctaaatccactgtctgtctttatctccttcttgtatttgatggtgtttatcctggctcttcagttggaaaagagaggcctccgcaaaccccagccacagccccgtcccttcagtgggaaatgtagttccacagatgatgatggatttccatgtgcatctttgttggagagcttctgtgtgattctggcatctagtagctagagcaggtcagcttatgagcacagggagatcttttctagacttccaggggttgtctttgggtaacaaggccctacacaattctgctttactactgtttaggtgatctagctccatctttttaacctctattctaagatatgtccacagctgtgcatgctccccttggtggtgtagatttgtttctgcaaagtagctactgagtcagggaccacccctatcttccccttctgccctggccacatgcacactcacacacacgcatgcacacacactcacacacacagctaggtataccatatgagcaagttctagctcatgaaatgtgaatggaagtgatgtgtgtcatttctagccctgccctagcaaaccctcccatgcagcattcctcagggctctctccctgtttgttggctggatacatagaatttaagcacctagaccaatgtttcttgagctcagcctatcagcatttggggctgaagaattcttggttgtgaggacttgtcctgtgcattgtagagggtttagcaacatccctggcttctgcccactccataccaggggcatctcccctgttgtaacagtctaaaatgtctccaggcattgccagatatctcctggtttggcagaaggtggagggaagcggggttgggaggggcaaaatgacccctggttgagaactattgcctagagtattgcagagccatatgatggaagggccaaggggccctgcaccacctgagatagaaagccaagtggcacttactgcacggggctgtgaagctatggaaatgttgaggtttacttgttacagcatccgatggtacctaaccaagcacactgctttttatctgctttacaaattggacttctatgtaagattccttttaaagaaagtgtatccctcaaaaagaatgaaataaacataacctttggaaacttttgacccagttaatctcttccctttacagataggaaccagttacaaagaagtgaggtgacttgtctaagaccacacagatagggagctgcagaggcaggtccagaactgaggacttcaggtgcttcaccctgtgccctaccctgaagccacttacctttaactttctctaagcaggaacagatggaagtgataaaaccagccacacttgatacagtttaagttggcctacatgtaggataggttgataaagtgtcttaagttcctcccctgaccccatcatctttcttcctcctgtttattgtgttgtatcttctgagtcactatttagggggaaggcattgcctcactcgtcaaagaccctgttaaaaaccaggttatttcctggggaaaatcatacttctacatgtgctacctggcagtacagatccctttaccacattggtcaggtacccctgaagaacagggagagcccaaaaatcaggtcccgagcagctcagtccccaaaatagggccagcatgggcttctgattgggatgaggaaaagactgaggaacgaggaaacaagggaaactgaaggcccatccggtggcctagccacacctggcaggggcacggagtgaatagctgagtcgccagtggaaaagatgtttccagcttcacgtgaagcctggctcgcattggcttgggccctgggtggggctcagcttgcaggccattcctggggcagctgggtgaggccagccccagcagggggacaccggcacctcttcacacgttatggtggtgtcctctggaaaaaggtgtgaagtaaatgcatcgactgatgtaccttgcacacatttcacaccctcctttttctgtttcatgctccctttctccctcaagccagctctgaatgtgtgagcctttgtgccatttctgaatttacaaatccccccagaaggcactcatcatggactctctttctagatctttgttgccagttatggagaaaagaatggacttaactttccctagggctattataaaacaatgatcatctgtcccaggtggttaagcttctataaattctcacaagtagcagaagccaggttctcacccaccagggaaagctgagcattggccttaccactgccaagtgtatttggagccgttgtttttctcttgtgctaactattccttccagccaaaacttaagttgagagaaggggaacaattatcctcattctttgagaattacaaattgtattttaaactggcatattttcaccagttttacacacttttttctctttttcttttttttcagtttggataatagttcttggaattaaaccttggccttggggatatccgagctggggggttaattgttgaattgtcctgagctaacaaaattgttaccaaaaaaaaaaaaaaaaaaaaaaacaagaaacaaaaaacagtaatttcatcttaattgctcatggaaaaaaaggtaaagaagtctgtagacatttggggtcctatatgctttattaaactaaaccatgaacagtcctagccaaggcagtttggacagtctgctgaactgtgttattgttacgagacttcaaaacttagatgttcagctttcctatattatgttgcaacatttgttacttaacctttttgcatcactttgaatgggataaaacttcagtattgaaagtttcttgggaagtcatctagcctcttggtgctcaaagtctgtggatccatagcactggtatcacctgagagcttgctagaaatgtagacttttaggcctctcccaaaatctattgaataagaatctgaagtttaccaagatcccgaggtgatctgtgtacacattaaaatttgagactcactggtctagtctgactccatcatacgaggaaagtgaggcccaggcaagtttccagaaggggaagctgtggctcaggaagaagggcgacaccttaaaagcaagctgccatgaacttcatagcctcttcagatccaggctccgggtgtggctgaaagcttcatgatatccattttcaatcatacttaaacatggccacaatataagaaaatgttctagagctgcttctactgtgggtacttttctaaaaataactgggaaagacttgcctggtggacagacaggggctgacatggtaatttcagacctggcaggtgaataatgagtcaccatttatttggatcactgctgcgggcagtttctcaggggtgccaagacggcagtcgtccactccacaagaaagctggagggcaaagcccacaatatttatgttggcattttcactatttatatgaggaaatattttcattaatctcaaacgtgtattaagtccctgaaatcaggtgtttgcttaaaaaaataaatataacctagttctcatatttcaggtttgttgcaataactacctctagctctttggggctgtattagattttattttcactgtaaatgagactataaattcaacagaattagtcagccatgcatagattctaacatgttactgtcattataaagaagaaatcatttttgattgtccaactttgctatgtgcctgggaagcaatgaaaataattattttagaagccaagatggggagaatcaaatgccatgtatttctgatgggagaggaagaagttcaaatgctccgtccagtgtgtgggtctaagttccctgccttgggcagaatggtcaggctgttagaggcctcaaggaggaggtcccatggatttatggcagagagagagagagacagagagtgggagagagggagttgtttctttccccgggtggagacagagaaaggaagatttgcattcctttgtgacaggattggaagcatctaagtcagatataatgtaagttaaaatgcacaccagaccacgaagcctggtatataggaagcactccagagatgctcattccttactgtcttctctttttctctccaagagtcaagctgatggcacagtccaggcaaaacccagaggcaggtttggtttgcttaagaggcctttatctgcactggcaaaacacaaaggagaatgttttcattgttactaagaaaagagctgctctgtgaatcatggctgcttcgtgggaacagcagcagccagtgcagagtttccatgcctctgggggcatcgggaatttggatttcctaatgagaactagggttcctgtggcctcaccctgaagtgataggagccattgagatctagaatagtctagatgaggtcagagggagcacagggtggttctgatctaggctgctgcactgagatgaccctgggtagaagggaagatgctgggggcacaggaaaggggccctgagcaggtgattctcaggggccacaaggaactgtgggtacatgggaaaggttaagaggagctcacaaagtaaacagccttttaggggaaagcaagtctgtctcatgatcccagtttttcttcaaaagaatatatagaagtataaaaatggggagggggcaaagagacgatgacctactcagaatttcaaataccctttgatgagtttaacttatcagactattacaattctgattcaccagtgaattggagatggatttgagagtgggtacatgcaaggtaatgaacctaggtgaagataatccaatggcacaggtagatcttcccaagcagtaataatcatatctgacattggcatggcttttcatgatttatagaccattcttatttgatcctcatggcaaccttaggaggaatttccctctcattagcccagacagcccagggttcatgctatttcactagaccagtggcctatacatgtagggtgtacaggagaatctattgcttgcaaaagaacactatttagataattttttctaaaaataatgaagaaattaaactttactaatactgaaaatatggattgaggctgccatatcgtgtctgttttatgtcagacagccccacatcatgtacactcaagccaggtcaggtgaggatggagggactttgcacttttcagaggatccaagtgccctcagcttgcttcttcacttcctgcatattgtctcatgttgcccttcactcagcatgtgacatgaatttattgattttattctcttccttactctgacagaatggacaagcaacttaaaagtattcctctccaagaattgcgtgaaccgggaggcggagcttgcagtgagccgagatcgcaccactgcactccagcctgggagacagagccagactccgtctaaaaaaaaaaaaaaaaaaagtattcctctccaaaaatgcaaatgagggtaataacagtggtgcaagcacacagcaaaccccaaaggcagtggagccccacacttctgttattcctatatgctcttcgtcagccataatgtgagattgagaacaatgacaatgtcatctgagctaataagtggccaaaacattttctttcttttttttttttgagacggagtctcgctctgtcacccaggctggagtgcagtggtgcgtgcagcctctgcctcctgggttcaagtgattctcctgcctcagcctcccgagtagctgggatgacaggcatgcaccactacacccagctaacttttgtatttttaatacagacggggtttcactatgttggccaggctggacacgaactcctgacctcaggtgatccgcctgcctcggcctcccaaagtactgggattacaggcatgagccaccatgcctggcccaaaacattttcaagaaggttatttgaaatgtgaattatctttgccatccttgataatgaatgtcacccaagtatcaattgtatcttataagcccaaggatattaacactccattgagatcagcaattcatttaacctcacgacatccaaacggaaagacaaacctctgcagttcccccatcccacccctgtggtgattaaaaacataagattctcaacagtactttaaaattttgcaaaatttattgataaatatttagcagcttcttttgagacttgttagcaaaaaaaaaaaaaaaaaaaacccatgtgactgggtaaatgttcttcctgatgctattaaaaatggtggaaataacacttaaagatagatataataacaaacaaaatgccaaatgcctttattagtcacataatactgttggaatagagagagaaaatattgctgaatgtctgaagaatcaaggatgagaacaaatgatgctgtgtaggatgtttgctgtttagttgtatgaaagcatacttgtcaatgtttcagtttagggtattcgtcaggttcagtttcagtaattcagaacctaaaaaactactttaaatttgtatgtgtgtgtgtgtgtgtgccacgtatgggaaaaagtaccagaaaagatatttcctcaacaattaaattacttctttaattaaaaaaatgttttatggaaaacctaggttaagtgtgcccactaggcagagattgagccagataaaagtcattccatgaattattcacaggaaagcttttataacaaagtagttaatgccagaagtacacaaaatgttacaggatgtcatccatatgggttaactttataaaaacaagacctttaaaatatagtggagtctttataacactgtataatgagatgggtagtgatcatgaaaaccttttgtaatacatagaccaggttctttgtaagttccttgtaagttattttctatcaaaatattaaagggattgttgaatttaagatgagttattcagttattcatttttctctcagaaaaagatgagacctcaatatgctggcctttctttgataacaaatattctatctggaaaataggttgtgaaaaaaatactagcactgtaaaatcatcatgaagaaggaaggtgagaaggagacattttcattgtcttaactgacccaggaaggctgtgactaaggtgtcttcctcaaacccatcacctcagactagattaaatgccctcctcctctctgcaatcctataacactctgtatacacattcattcattcacctacccacccaccaccccactcacccatccttctgtccacccacccacccacctacccacccatactacaaatatgtattgatcacttattaggtaccagcgttctagatggtggttatacaaaacagacagtaaacaaaaccgtcgaaaaacccagctctcatgaaacttacatcccaactaggagacacagatcatttaaaatatgaataagaagctggtcatggtggcttgagctgtaatcccagctacctgggaggctgaggctggaggattgcttgagcccaagagtttgaggctgcagtgagctatgattgtgccaccacactttagccttagtgacagagtgagactctgtctcttaaaaaaaaatgagttatataagtttgtggtgataaatattatgggcaaaaaaaaaaaagaaggaaattagggagtgccaaggaatacattgcaattttaacttcagtcatcagagagagcatcactgagaatacagaccccaaataggtgagagagtgagaactgcagattcgggggttaagggtttaccgagcaagagaacagtaagtgcaaaagcctagagggattgtgcttctgttttagttttaggtgaatgagtgacggggagaggaagcattgaatcggggtagtaatcgggagcggggctggcaagctgggcagagcctcggtcttgcaagatttgggctttcattccacgtgagatgggaagtccctggagggttccttccatgcagaggccatgacatggtctgcctcatgttttaacagggttgttctggctgcgttatggaggacagactgaatgggggcaagtgcagaagtagagagctgtaaggagacagggcagggatcaaggtgagaaacggcacaaggtggcctggacagagtgaagatgctaagtgtttgcatgctcaattgctatgttacattaaaattgtctacttactttttatatcctccacctacatagtgcattcccagcacctaccacaatgcctcagccctacaaaattacaaactatctcctttttggaaatgaaccacgtccattttgagggtggtatagaactcatttccttgtggctgacctatctacaaaggcaattgaggtagaaaaagttacttaaggattaaaggaaaaatcagtggttgattgtgggttattaagagaaagcagatgattgggggagtatattctttgtcatagagactaattttaaggaaaatcttcctttcctaacaaccttgtgtgttttggtctaagacagaaaactgtttctatctgatgtaataacttggaaccatcacatagcacaattccaggacatgcctttcccacagaatgcagtgtgaatccctgaggttgtgcaatgtagtgatgatttatggatatgtatctatctatatctttgagaagtctctagctattgggaggtgtctcaaattcacataattgcagaaacaaagcaaaaggcatgatctcacgtactatttgttcagggacttgtggctttggatagttatagtagattaaataatggttcccaaagatgtcagatcctcatccttggtacttataaatatttccatatgtggaaaaagggtctttgcagaggcgattaaattaaggatcttgagatggagagataatcctggattatgtgggtgggcccaaaatacaatcacgtgtcctgaaaagaaaaaggcagagggagatttgacatggacagaagaggaaaagacaatgtgacacccaggcagagactgtagtgacgcagccataagccaatgaatgctgacagccaccagaatctgaaagaggcaaggaagggcttctaccctggagtttttggagggagctccaacatcatatctttgacccagcagtactgattttttgtcttttagcctccagaactgtgagataataaatttttgttgttttcagacaggaagtttatggtaatattgttacagcagccacaggaaacaaatatagtaatatggtagtagctttaatctatttcttgtgtggtcatttatcctctgaaagacctactacattgtctttagatttgtctatgaatatttcatcagtgactctatgcacaacagtgattttaaagcggaggcaaggtgattatagcactctctggtaggaaatatcctaatgcctgccgaattgttaagccaggatcctcctaatttagggtatgagaagtctatttggtaaataacatttttataaatagcaaataatggttgaaaggaaattatatgactgagccatcttgctttatgattttacttacttaatggttaaaaatcgatctattcaaagatttcaaatcacccacacacatatccatctttctgttttccctgaaaaaactgagagcaagcttttatctggagtagaagctctgttggacatgtagcagatgagtttacactatgcatgatgctaaaaacctagttaaatgtgactccaaagtcaatcttacttgatctttcttcatcttgatacctcacaaccctctaacccctgaatcatgggaagattctagaagtctcatgaagactaaaacactgaggaatgttgaagatattttagctgagaggcttattgcctaagttcccacaatctctgggagtgattctttgctaatttgccccatttagatgtggaatttgttatcaaagatggaaacactcccgcctagggtccagtcttcttaggtggactatgaagctgttcttctctgaagtcttgctgtcttccccagtatcttgagtgctggaggtatggctccagctactcatggaacctatgaaccatggcaatattgtatcactgtgactcagtgcttttctctaccttccaaaagccctcaattctctcctctcctctaaatattttcaatgaactttgattctagcaacaaaagccataagggacaagccttcaggtaacattttttggccttgccatctaaatcctctaagtcagatgtgagaaaactatggcctgtgggcgaaatccagcctgcctcctgttttcttttttaaaaaataaagttttattgaaacacagccatgcttatttacttatatattgtctatagctgcttttgtgctacagtggcagagttgagtgcttgagacggagatggtatgacctgcaaagcctaaaatgtttaatatctgaccctttacagaaaaagttcacagacccctgctttaagtcaagggaactcagagtctgattatcatcttttaacagagatggaaggtactgagaggactgaacccgactgaattactgccacaggatatcctgccacttaggtccagaagttgtgggaagtctgagttaactggaggcccaacatgatttctgtccaattcctaatgaccctttgctcttgagctactgcagggatggtggcaacacacatcccaaagatgatctcactctccatttacccacattccaaggcaggccagatctaactggattgttcaaggatgcttccgttgagactgtaccctctgtccatttgggtttcctcacacattctccacaagtcctcaggctgcttcatgtgtggacgaactagactggaagatgctgaaggacagaccttccagacaatgagctcttcctcaagatccactggcatattgtgctgtgcacactggaggtgcaggagtatccctactgtatactatgttaactgcgagacccaaccttctgctcagaggatgacaacagatggatgcaagttgtcctatgattgccattttggaattgccatttgaagacagcggtgacctgtgggtctggaggaatcactgcagggtgggatatacatatcaaattctgcaagctgggtcagttgtgggggtatctacattgggacacttcacaaagaaagaagagggaaacaaaatgatgcctatataattgcctcatggaaaagattccctatcatgttacagaaacatagtccactatgtaatgaccttggtggatgatagcgtccagattcctcttcagtatggtgtgtggttggttgttagtttgtacagaatgaatgatggcctctgtttgcctgccagccaaatgtgggacactcagaaaagcaaatttttcacatcagacagatctggattcagattttgggcttacttcattctgcctttgccactttggtcaatttaattacctttagttttatcacctgtaagatgggaatactgtttcttgattcataatgttattgtcaagatgaagtaaaagagttaatagaaaagacttccacgctgctggaaaaaatagtagtcactcaattctttgccattttcagcttgtcttattgttgagctaaacaaaattcccaaggagatttgtaaatttattgaacacattttattgaagaggtggtaggagctttggttcagccaaaaaaaaaaataaaataaaatttaaagattagtataaagtaatgaggatagatctacagttgttattaagggaaggcaggctctgtgtgtatttgtaccccagtatggtggttttctctgtaatcctggaagctgttgtcagcctgagaaaatagcaataacaatgtttcatttatggacacagcgttgggccccatcaggaccctggtacaaaaggccagtggaagctgagagggctcgatggataggaagcttggcactgatagtaacaaatactgccagtaataatagcatattccagcttctatataaaggttgggactgggccaggatggaagttagaatagagcataggttctgtgctacttccaggaggtattttgttcttcccttattctttgagatcagaacaaagaaacaattgactggatatagaagtttcacgacaagtaaatgacattttgttcaggataattgtagcgtttgcattgtttccttttgacagttgatcaaaaggaaatttaaatgtacagggctaactgtccccatgtaggtcaataaataagctagtgcattcagttttcatcctaggattctggaaggcaaacttaggagtctttccagaattttcctcttcagttgactcagttggcattcccctatataattgtttcaatggtgctgccactgggtggttgtcagcctccaccatactcagagaattgcgtggcttcctcctaaagctttgctacattgtgatcttaaatcccagttaaagaacagcacatcctgaggatagtcttgatagttttctaatattttgagagctcatcagacctgtaatgtccattggctccttccttctccctatttagaatttttttttcatactgttgacattaagaagccaggagactggtggtttttacattttttttatttgctcaacgtcttgccaggattgtccaaaaatattgttttaaaacctttgtcctaaaaagctctgtgaaattacaaggtaggccaaactcagcatgttggctgaagttcaccaatgggagcccttataaagagaaacttagacttgaaggaagaccattgaagcattcttcttgtctttcctattgatgcctgttagaattgtagccttttaaacagaggttccaggacctagtttttcagccagttctaagatttctcttttgcttctttttcaattatgtagaaaaaatggccttgctaatagcgggaggaaaacaaaagaattttacattctacatgctcacgatatttttaattgcctaaaactgtgactacttgccaaaattattctggcattctatgaagagatgccatttgtcatcagaaaacttttgaactctacataaatgcaaagtattagaggatatttttatatccagacaaggcttataaaaacaattagactgtactttatgggttttgcttgggtcgaatatgattctgatcatcagaaagggatttctcattcactccttgattaattgcatcagtaagggtctactcaggaaaacagaagccatgttaggtatgtcaaacaaaggaggtttaaaacggacctgattgtaaaagtaagagctgaaggaacaaaaaagagggagtgttgggtaacccagaaattagactgtgaggctgctaccactggaagaatggaagggcagaggggggccagcaccctgacttgtgctcactggaactgttggagttgcatcttttggaacctcctgtttctgcctgctggaattacaaaggctgcaggagctcacagctgttcaaggctgctgctactgctgctgctgtaacagccagcaccacaggagcccagaactgctggctgccaccactaccagaactgactgccactactgggtacgtagctggagcaaagagaagaacaatggtttctccctcttcgccctttccatgcccaccgatgtctcccactgcttggatctaattggaagccagttggcaggattctggggaatgtagcttgcagggtttgctgagtctggaagagaaggaatggaattgaaaccaaacaggcaatcgaccagctcctttctctccttcatgaagaggtggaatgtgttctggatgaacctgccatggaatatggcaatgtgtgacatgtccttgccagctctgtgaatgaataaatgttcacttggctttcttttcattccccaaaatatttttaattttgagtagcttcaacttacttaatatttaaagatagactatgactacaaaaatcgaggaatacattctataatttgtcttccataatttgtttctttagaaggttttggaaggaaggcaactgacattgatttatgcttttacaaagatgttaggtgacacacacatttttcatttaatacttacaacaaccttatgcagtaagaataacttttatccccaaaaaggagtgtctcgaggaaagtttcacaagctcttcatctccacagccaggagacctctgtctaacactttccatccagccagcatgtgggggcctggtatgctggaaaaaaattacattttttttttttttttttttttttttacttagaacccaagaggttcctggatatgggaagaataggatttatgagtagattgccaaagtggtttttttccccaatttgtagtgctgctacaaagaaacaacgtatactccagtggatagaggtgccaatcttgaatttgcagaggactttgcttgaatttcttgacagcacagcttccagtctgtcttttatagtttttatttacttccaatagattggaagcactttgatgacttccatagtgtcatgttcatctctgaatcctaaacaggacctcgtggagggctggcatctagagaggctcaacaaatgtgtagctatttaactgtgggtgttggaaggctctgcgtccttcatggaccacacaggacctataatcttcagagacaacttggttcaaatccagactcactacttactagctgtgtgaccttgagaaagttactactttttctataatctcttctgtaaaatggagataatacctacctatcaaaggtcattgtaagaatatgttggttaatgtacataaagttctggacattatggtgagcatatgataaatgcttaataactacctgtttaccattgtatcatttcttactgcagttaacatatattaaaaatcaatttgatcactactcatgagcaatgcactgatttgaaaatatttgtaaataagagaccatctatatataaatgaactttgcttcttttatatgttgagtgcctggaagctttctgcagggaaaatcaactggttgaatttgaaatggcctgagttttggataaaggaggatgaatcaaatcttgtgtatatgcgtgtgtgtacttgtgcatgtggtgtctttatgacattattctcttttgaagaacaattctttggaacttcatgttttgatttacttaccatgagttttctgtatacttgatgattaaaatgtccccatttggtcttgctctctgattgctttcccaaatttctggttatttgccatttcatgctatgaaagcactagaagatggttgccaatgtagctaacgcaaatattgcctgcatatttccaagtatattgttttggagaagttaagggtcaagggacagcatatcctggcatttgtagcttcggtttaacctggaaaagctaatttggaattagccatgtcatgcaccattacggagccagaattttttttacagcctatcccatctacagcagggattctttccttaacagggcacatattactttggcaaaaactatagagactggatatcaattttcagaaaattctaaagcggtattaatttttttacagtataaaaccctagtccaagtttaagaaaccacacttgagacagttctctaaattcaaatcataactctgtctgtttggggagtctttcccctcaaaatgtatgtttattcattcattaatcgattcatctactcgtttatttattaaacacatttaaaaattcatctactcatttatttatttaacaaataaaaatatatttaatcaaatatattttgagtgcctgcaatgtgccaggtactgttcaatgctgtgaacacacacatagtgaacaaaataggcaaagtccctggtttaaaaatgttaaagctaaaagacaccttaaattttggtgctatatttttattaaaggcaagattatataagtatacaaaatcactggaggtcagtaggcaggagatgggcgaattgtcttccagacagccaactctgcttcattcctgaagtccctcttaataataaaacaaattaaaatatctaaccctcagagttgtaaaggagaacatcagttagaatacttatggctagtaagagctcacctaatttaaaatggttagacaataaagagagtttaacaaaacaaaacactgaaaggaagagtggctttaggcactgtttcatccacaggttcaggaggtgacagggcctcagccccatttgtctgaaattctcctggaatgtccgccagctcatttgctcctgtgctcctggcagtgtgtttgcagtaggacagtgggttctctcctttcctcttcactctgtaccaccgccgctgctgctgtttatctcgctaagtgttattcatatgaagaattagaataatgcaactgcaaatgagttcattccttctttaagatcccaaatcttttaaataatatatacagatatatatgagggatgagtgtcaaaaatggcctggtgctgtcaaacaaacaattctggcaaaacccaaggggtgggaagagatttacaggggagagcaatgtagcgcttatatagtaaaaaataaggaataataatctcactgggataaattgggaattggggaaagaatgtgcaaagctatgtctggtgaagaattgaaaactgggtctcaataagtaaaggagtaatggtcataatacaatttacagaaaagaaaatacaaatggcaaacaaatacatctttaaaatgttcaacctttccagtaactcaagaaataaaaacccaaatgatgttaagctactatttggcatttattaaactaagaacaataaataaataaataaataaataaataaataaataaataaagttatgtatttataagtaaacaaatatatgtgatgtagtgctgacaagcctgtgggaaaatggtatattcaattcttgttagtgtcagtaacaattacagttcatttaaaagtctgaagagaaattctgtcaacaagcataacaattttcatacctacagctaagtaatcactctctttaggattattcccaaagaagaaacttgaaggaagaaaagtgatgtataaagatgcttatttttatttatttatttattttttgagatggagtctcactctgttgcccaggctggaatgcagtggcacaatctctcctcactgtaacctctgcctcccagattcaagagattctcttgcctcagctcccgagtagctgggattacaggcatgtgctaccatgcctggctaatttttgtatttttagtagagatggggtttcaccatgttaaccagttggtcttgaactcctgacctcaggtgatccacctgtcttggcctcccaaagtgctgggattacaggcatgagccgctgcgtctggccctaaagatgcttatatattgttatttataatagggaaaatctagaagcaactgaactctgtggcaatcagaaaatgggtaaaaatagtatgatatattagttcactggaatttggctagaaactgaaaaagagatgaagaggagaaacatggaggtgttgaagtcttgtggaagatatttattagcccacattgattgaaaaatagagggaaaatttttggcttctcaatgttctggaattgagtgtcagctcttacatgaatatgtaactccacctgtgaagtctagtgtctcaggtgagtgccgtgtgctctcctaagacagcattctcctgtctgtaatcatggtacttacctccaggggctagcgtgaagatcaagtgaggtcatttgcatgaaacactcagtgcagtgccaattgcaaaacaaaccaaggaaatcgctacctaaatattattactgtaacagtgtttatttttttctttgtcaaattaaagattagaagagagcctgagaaaaatggagaaaaggtcctgtgcatgataatggaatggatggaagttttatttttaagcatttccctttataatgttttataatttttaaatgttgacattttaaagaatatatttctgagcccaaatacttcccagggcaaagtcctcataccagggcctcatctctcgagcagctggaaagcctgacttcatagcccgaccacaagtgctcagaatgcaaatacgaaactacagagtccaccgtacagatttaaaatgaactgattgtatctttatccttcccgcagctgttttgggagaaactgctgttcttagatgtctgattattccacacctgtgaggatatagtattgctccttgagaaccaaatcatgtttgaaatctctggtgtcagagggtctttaaaaaatggatggcttagcatttcctcagaatgctgcattcacgggaggggtcttccacctgacctgtcgggaacaatgcatctttcaggctgctgggcagtgaatgggatgctctgaactcctctctttagggttattattctgaaatcctcattgtcggcaatgccttcttggcagctggacagtaaaatgtatctatcaattcagtctctttccttttttttttggtagctgcttggctaaagaagcaaaaaccaacataactacattttattctgggcacctgcattatttatgctgtcagaaattctaggcaagaggctgaaaccgtgatttattattaggcttggaaactgtgcggacaagcaaaagagactttcttttaatgtgggtgacaagaaaatgaaatgacaatccggaaagaacaaactccaaggcatgaacttttaaaatcatctgccaattaactgtgaagaggatggcatcctaatcaagcgcttgatctgcttcccaggcgctccctgaggctcttctgctggctccaccaagtaggaggagaaagttgattctgtgttagccttgtagagcaccttcccagaaggaagaacaggggcttctattctggcacaagaatcattctcagaagggctcggtttgggttcaaccaaggaattggactggccagaagtgcaaagagaggcaggaacatcctaaatggcttctgtggcttgtgtgatgaaaatatcatcttctgggcttaaaatggatagaaacactctgaagggcaagccgtgaagagagcaggggatgtgctgatttcgttttttttttaaagacactttttaaagcgtagttttaggtttatagcaaagttaagaggaagatgcagagatgtctcatttacccctgcccccacaacatgcataacctccttcattgtcaacatccacagtggcacatttgttacaactgatgaacctactttgacacataatcacccaaagtccatagtttgcattacagttcacccctggtgttgtacattctatgggtttggacaaatgtgtaatgacatgaatccaccatcatagtattgtagcggggacattttacctctgcttcttagggttttttagctggtcccaagaattaaattgacataagacagatcaacaggagaaaaacatacaaatttaattcaagttttatatgacacaggagccctcctcataaggaaatgaagacccaaagaagtgacaaaacataaatgcttctacattaggttgaacaaagacaggcaattgtgaaaaagtaactaaattatgttggcggggggcacagcaaaagtaagatgtgaattatttttacaaggcctgtttgtatagaattcttccagccatgactttccaccacagaatgtttcttttcttttggtacagagaggacgtctttcacatggtagtttttatctcctgttttcaggaagaaattagggagattagagtctccttcttgcatactgttttataagtgtgtttttctcaaaataatccttataccacagtgaaatattttggggtgcatattctgccacctttcagtatcatatgcatagtttcattgccataaaaatactctgctccatctatgtaaatccgcctccctctgaccctctggaaaccacttatctttttattgtatccatagttttgcctttttaaaataacgtcttatagttggaatcatacagtatgtagccttttcatattgtcttctttcatttagtaatatgtatttaaggaccctccctgtcttttcgtggttttgtagctcattcttttttagcactaaataatattgtattgtctggatgtaccacagtttatccacttacctactgaaggacatcttggttgtttcaagttttggcaattatgaataaagctactataaacacctgtgtacaggtttttgtttggacatcagttttcagcttatttaggtaaataccaaggagtgtgattgctggatcatatattaagagtatgtttagttttgtaagaaactgtcaaactgtcttccaaagtggctgtactgttttgcattccagcagtgaatgagagtttctgttgctccacattctcaccagcacttggtgatgtcagtgttccatattttgggcgttctaatagatgtgttgtagtatctcattttaatttacattcccctgatgacatctaatgtgaagcatcttttcatatgattacttgccgtctgcatatcttgtttggtgagatatctgttaaagtctttgggccacattttaatcaagttgtttcttttcttattgttgagttttaagagtcctttttctagatttattttttgtatgtggatatccaattgttctagcaccatttgttgaaaagactatctgtgctctattgtattgccttttctcctttgccaaaaatcagatgactgtatttatgtgggtctatttttgaggtctctattctgttccattgatctatttgtccactttcaccagtaccacactgtcttattactgtagctttatagtaagacttgaagtcaagtaatgtcagtcctccagctctgttcttctccttcaatgttggctggctattctgggtcttttgcctctccatataaactttataataagtttgtcaatatccactaaataacatgctggaaatttaattgggattgctttgaatctatagatcaagttaggaagaactgacatcttgacaatattgagtcttcctatccataaacatggaatatctctttatttatttagttctttgattttgttcatcaaagttttatagttttcctcataaagatctcatatatatttgttagatttatgttagatctcattcatatttgttagaaatacctaagtatttcactttggaggatgccaatgtaaatggtattgtgtttttaatttcaaattttgtttgttcattggtggtatataaaaaagtaattaactttgtatcctgcaaccttgctataatcccttattagtacaggagttttttgattcttttggctttcctacctagatgatcatgtcacctgcaaacaaagttttatttcatccttcccaatctgtctaccttttgtttctttttcttattgcgtcattccagtatgatgttgcaaatgagtagagacacccttgccttattcctgttcttagtgggaagctgtgagtttatcatcttaagtatgatgctagctgtaggttttttgtagatattctttgtcaagttaggaacattcccctctattcccagtttagtgagagtttttaatcatgagtaggtgttgaattttgtaaatgcttttttgatcttttgatataatcgtgtgatatttcttttttagcctgttgatgcgattaattacattaattgattttgaatgttaaaccatacctggcataaatcccatgtggttatggagtataattttaaaaatatattgttggattcaatttgctaattttttattgaagattttgcatctatgtttatgaaagatattagttcatagtttttttgttatgtctttgggtttggtactaggataatgctggccacatagaatgagttaggaagtctgctttcttctgtactctgaatgagatcattgagaattggtataacttcttccttaaatgtttggtagaattcaccagtgaacctatttgggcctggtgttttctattttgtaagggtattaattattgtttcaatttctttaatatataaaggcctattcagattatttattttgataacatttccagagatacttttccgagtataatcaccagattatcttcaagtctgcagttttatgtagtaaaaatgggcaagcatctgacatgtggggaaggatagggggtcttttatgtatatggacagattttcaccatgaattctaatcttgagagttttctttggcaaaatctggaccaaatcctataataaaagccattttaaagatgtctagtttctgcagatgttctattttctgagggtgatgatgtgatgtcattcaagccttccatgtacattgtgcaagctgtgtaatgcaaaacctggggggcatttacatagtggtttttgtgccaatagaaaatatgttcactctataatgagtatgtgttacctttagaaatgggggaaaatttttaaaggactttacttaaaatattttaaattggtctcgaaatcaaatgacataggtttcaatctgccaccgactagctgtgtatccttgagcaagtaactcagttacctccttgatacactggcttacaaaaccctccctaagctgtcccatgtttgcccagttcatcatgtgctccttactcttcttagcattctggaattctggtatccttttcaattcctctaacatgccatgctgcagtggttttaatcacacctttttctctgctcagcacttctcccaactcctcatctggctcattcctctttcttcttgactcaaaggtcatatccttagggagcccttctgtaaaactcaagactgagttagatcctcctggacaagcaccagtagctatctttctgtatcactcattatttattaaatgtttaaattcttcaataactgtatcatgaggccaaggtctgtgtctttcttgttcactgctatctcccccagcctagcacattgcctgccacacagaaagcacccattgaagattttcaaaggaaaaaatgaacaaatgaactgaggtggaaaatctccaagttttttttccattttcaggagtcagtggcattaattcagtaaagaacaaagatgtgctgattgtgtttgtatgtgctcatttgctttcaagtgatagaacacccactcaaactggcttaggaaaaaagaggaattattggtatgatactgaggtggctcagagaatctaaagaggaattgtaggaactacagaggccctgaggagttcagagactgtaactgggaactcctgctcgtaggaatctgacttcaagcccctaattcttttagaaggttccattgttactcaatcccaagtggacagacttcatgggtcatacatcttcgttttatccattattcttttcctctgatgagggtaactccctattgcctctcagttcccatttttgttttgactctctttactgtcaactgaggatttcacggtgaagtttcttatgaaaaattgcttggagaaaaagccagtgtcaagtcttgatgttctggaaatttttttttagtccttcccagccatgacacaaagtggatccagactgtctgggctctcacttctctttagttaagttgctgagctcagaggatattgactttacattatggaaaactcaataactgaacatctcattttggatgtagaaaaatttaggccctaaaagctttagtgatgagcttgattcatagactgctttggtgatgagcttgattcatagactgctttggtgatagtaataaggggctggattttatccctgagtctctacccagtgccctttgaatgaccacactgcctcttaagagagaacttgcatttggttctttggttgataactacttagaaaaccgatgttgtcattttccacagataagagtatggaaaagcaacatagcctcaaggcaggtttaacaggacaggttcccaggatagctgtgtaaattaaccatcccactccattctgagaacaaatcttttctgcaatgctagatttgaattgtagatgatagaaaaagagcagtgcagttctttgatttcttttcttgcttgtgtttagcacgttctctgatataagccacatgggctagttcttgaaaattgtccatgcaatttaagtccttttgtaaatagaaattctagaatcagaggacttgacagaaactaccaaaagccaactaggcaaccttttacctctgggaggcctgttgtgaagaccctgcagtaggtttttccgtaatgggttcactcccagctggaaggaacatctccctcccctgaggccccacagcactttgctgtacttctcttgggatacttaaactctctcccattttcttccctattaccgttttaagtgcttatctttgcttctttcataaagtcttgctcagaccatgcactcagcacgcatttgttgcctgtattaatttcctattgctgttataacaaattatcacaaacttggtggctttaaacaatgcaaatttagtgtattacagtactagagttcagagctccaaaatggtctcactgggctaaggtgtaggcaggctttgttcaattctgtagcctctaggagaggatcaacttcctttccttttccagcttctagaggctgcctacatctttggctcatggccccttcctccatcttcctagccaactgcagtggtccaagaccctcttatgctgccctatttctaccttcttcttctactttaaagaactcttgtgattacattgggttcactgtataattcaggataatctctctattttaaggtcagctgattggcaactttaattcctctttgacatgtgagataacatactcacaggttccagggattaggacaggacacatggggggcaggtacaggggagcatgaatctgcttatcacattgcccaaacacaactgaaatcagtagtctgactattggaacaatattgatggctgcttcctttattcaagtgactttctgataattcataataaacattttttttctgaaattgattttttaaaatattcccaggagcggatagttatgctttaaatgtcctaattaattatttttctgcattaggatttttatatatttgattttattaaagcaagattcacctctattacagtgttagaacattgatttatataaatctgtgtaagggttatgatagaaaagcttttgcattaaaaaaagaaataggcattagcagctcttggagtatgtggtgtgtgcttttttagggaaagcttttttagaagagatgctaatatcagcaaagtaataaactaatgtcctatttcctctctcttgtaaaaaaatgaatttaataggctaaatattatcctaggctgtggtttatactgtcatcagatgctactaaatggaaatttgggctatgaaaatataaatataaattcataattctcctgatgttaagaactgttttaatttactgactaaggaattgagtggaagcagaaaaatcacatttctagcagatccattttttagaaagcataacttagggtaaactggaccttaaatagcacatttcttaattattctccttaattatagagagtagctctttcagtctaactgtacgagatacactgctaaatttgaacattactccttataaccaccgtgcaaggtagttacaaatattgccaacttacagacaatacaatcaaggcataaaggggttaagtaaattgtcctaaagtcacagagataaaaagtcatatttggggagtccatgtttaattcagagtgtgcctgacttcaaagtttatactctctctattataacacagcaagagtccttggtgccaacattttgcacagaaactcaacaaaatgtgtgactttaagctggagatcaattttagaattgcttctctgttcttgtttataggcgttgcactgtcaacacaggcaccacatggaaagaatctacatttatcactctgctcagccctacttcctcattctttggaacagagagaaatagaatttgtgatgattcataaaagtcagatttataaatgtacagtagtgtcagcctgacagcaaagagagattcatggtcttgaaacaatctttaaaaaaaagagagcaggccaagtgcggtggttcacacctgtaatcccagcactttgggaggctgaggcaggcagatcacttgagatcaggagttcaagaccagtctggccaacatggtgaaaccccgtctctattaaaaatacaaaaattagctgggtgtggtggcgcatgcctgttatcccagctacaggaggctgaggcaggagaatcactgcaacccgggggatgaagtttgcagtgaactgagatcatgccactgcactccagcctgcacaacagagtgagactctgtctcaaataaataaatagaaattaaaaaagagcaaaaacacagattctattataacatttgtgctaattgtactggatgctgttgatggaaaaataatattttgtaactttccttttatatgggagattaaatataaagaggtgatttgtggaccattttcttagaaaacaaaatccttagtttcctgtgagaaactctttctctctgagaaaagaattatttacctcattcaaactgcaaaaaggcaggcaggcagggtgaaagaagaggccatttttactcctgtagtgattttgatgtctcttttcttctttttcttagacatcaatccatatgactcttccatgtccaggaagactttaaacagtctttgcatgaacattaccaaatattaaagtttactaatttaatactcagagaaataaagagctgttttccagtatttcttctgcaatgcttttagaacgcacttctattttcttctttagggactcctggaaattttataacattccacagcttattaaacatgtgatatttcacttgcacaagatgtttttgatggtggacatgctaacagttgggaataggtttggcatgtaatagtggtatcttaaataaaatggaaatctccctctttatgtctctccctctctctctctgtctctctccctctctctctttcatgtaaaagtccatagaaaagcaatgtagccttgaaatggcagcttttctccaagaagtcttcaggaacctaagcttcttccagcttacagccccgccatccatctttagggtgtacagcccacttccttatggtctacagtggtagtcaccatactcatggtcccaagcagtagaatggtaaaaggaattaacataaaaagggggcaaaagtcttagacaagtttgtttgcctatttgtttttaaggaaaattctggaagctaccacatgacatatctatttacatcccattggcctgttcttaatcataaagccacagagctagaaggggagttaggaaatgtctttattctttgcagctattaacaagctaaagattctatatctatggaagaaagagaaaatggatattagaggacaattagcaactgctgccacagatgtaatagccgctccttgagatctctgaagggcagccatgtgaacatagtatcaaagagaaaaacttaaatcttatagtaaagttttagggaggagacatttggttcatcataaggaaccttctaacagttagagtagttccacaattgtaagacctgacattttgtaatggagagctcactgttactggaaagtattcaagcagcaggtgcttactactccttagtgacagtctagaggggatttcttcactgaaaggtagttaggactgggtgaccactaaggtatcttctagagcctgtgaaatctgttatttcttaacagctgtaagatctgtaattatgttccctttttattacagatattggtaatttgagacttctctttttttcttgatcactcttctaaggagttattacttttattaatttgttcaaagtaccaacttctatcttctcatttttctctattataccttgttttccattccatagtttcttctcattttattatttccttctttctactttctttagttttatgatgctcttcttttcccaactatgagatagaaatttaaatcatggattatcagccattttaaaaattaaatgcttttattaattcagggtcaaagaaaatagaattgtgaaagtgctatgtaaattataaagcacaatgcaagggtgctatttttaccagtatttcagtaactttgctgtaaccctttatgactgcaagtgatggtgatttggaagatttttgtgtctgcttctaacagtttgtatgtgcctttcagatgttggttttgctttcttgagcaccttggctttattctactttgctatgtctattgggttgtaaaaccagataaccctattaataaggtgttgaattagtatcaaaattctttggctttttgatcctgggcaaatgatttaatttttctggtctatgtttctgcatcttttctggttctctgtttatacctgtggattcaaattaccatatggtgttattttcttactctaatacagctttgctcttcccccttttcctttgtgctgttgttgttgaatattttacaacaatattttacaattctgtactttacaactccaatatacaattatatatatagttttatacaattgcttttttaatgagccaagagaagaaagaagaagaaatatgcatttgtgacatcttttataattacacaattaccttttctgatactctttttatccgaggtcacttgctttaagcatgaagaacttccattagtatttcttgtgaagtagatctactatcaatgtatttggtctgttttcgtttatctagtaatatctttatttttgccttcatttttgaaagatagttttgctggatataggcttcttggttgacagctgtcttctttcagcactttaaatatgtaatcccactggcttctggcctccattgtttctgctaagtcagttgttaatcttattaaggtttccttacatgtaatgagccatttttctcttgctgctttcaattttttttttttgtctttgtctttcagcattttaactatgatatgtctgggtgtggatctatttgtgtttatcctgtttggagttcattagcttctttaatgtgtacattaatgcttttatttaaattgggaattgtgtgcataggtgcatgtgttttatacacatattgatgtccaataattctctgaggctgtctctgttcattttcttcattctttttctttctgctcttcagattgcatgttctctaccaaactattttcagcctcactcattcttttttccacccatttaaatctactatcatttctctgtagtgaaattttcatttcagttattctacttttaaactctggcatttccagttggttttttaatataatttctatctctttattgatattctctatttgatgaggcattgtcattgtagcctcttttacttcataaagtatgattttctttagttcttttaacatatttataatagctgctttgaaatctttctaaaatacatctaaatcatctcacagatagtttctttctctgctttttttcccgtgtatgagttacattttcctttttctttggatgtctcatgacttttcattaaaagctggacctttaaggtaatatagtataggaatttgggattctgattcttctctcttctctggagtttctgttgctgtttgcttgggggttttttgttgttgtttttaatgacttgattaaactattttagtgaggtctattttccctacactgcaaagccttcactatttattttcagagggcacagccttgggcatactcacatcaccctggaatgactggttttggtagagctatatttggccgtctctttcccagtctctctgttatatggtctgcttcatttgatatcacacccagctgttaggctccactaattttttgctgatttttctagtatttcttaaatgctcttgggcataaattatttaagtctgatccaattaaattcatccagtgaagttctggcggttgatatttgaggcttgttctcatcccaggaatgatgtttttagctatctcctttcctagttctctttgataaactagctggtctgcaggttagcttttgctcttctatagttatccacctcctctcaattgtttaccatcaaaatctccattgtttttgagagcacccttaaacttgaacttttacacactctattacaaataaagtcagctcctttgggggagagcttcagagctctctgttcttatggacggcctctccatctgggaaaaatttctgaataactgctttaggcatgaggcagtgatagtagactctagtcttctcaaattgccttccctggcatagaacctctactctaaaagcaagctgcattgagggcaatacgagccctggtatttttgatctgctgtgcttagagtagagtctctgccttatgaatggaggatagatagaacaagggagtctccaacctcttgggtgcactcactaaccttagagctgaagaaaggctggtgtcctacctttccaaggagataattatattccttgactgagagctaatgggaaaaggaggccagacttattggccacatcttctcaagggaggagcttttatcaaactgagctgagggttaaggaggaactggatcttaattcaagtgctccagatcctcagtgttctttcagagttttagtatattttcttgaatgaatgtttctgcattgtctatatgcccttagaaggattattagggactttatatatatgattttaaaaagtattttcacaagttatacttaagtcattggggaacaggtccatggagcttttcaaagtgccacttcaaaagtagaacctcagttttaacataaacatatatatgccgagtcattaagtagtgttgcatgtaagttttgatatatttttgtcattcagttcaaaatgtttataggttgcagtgtacaggcatttctcagaggtattgcaggtttgattccagcccactgcaataaagtgaaagtgaacattgcaataaagtgagtcacacaaatgttttggtttctcggtacatataaaagttatgtttatactatacagtaatctattaagtgtgaaatggcattatgtttttaaaagcattatattttattataattatttatatataattaggtattaatttattaattatattatatgataattatattatactaatatataatagttaattatattaattatatattatataattaattatattaattatatattatataattaattatattaattatatattatataatcaattatattaattatatattatataatctttgttatatattatataattaattatattaattatatattatataataatctttgttatatattatataattaattatatcaattatatattacagttataaatagtatatatttagaaatatatatatttctatatatagtaacatataatatataattgatataattatatataatatataattgatataattatatataatatataattgatataattatatataatagttataaatagtatatatttagagataatgcatttttataggttattggaatataaaatattattttctaaaattgctaatttttagaaaataatttttctaaaaatgctaataatgcattttcacaaattactgtgatataaaaaattattttctaaaaattactaatgatcgtctgagccttcagcaagttctaatctttttgctggtggagtgtcttgccccagtattgatggctgctgactgatcaggctggcgattgctgaaggttggggtggctatggctatttcttaaaataagacaacagtgaagtttaccacatcggttggctcttcctttcatcatggattttgctgtagcatgcagtgctgtttgatggcatttacccatagtagaaaattggaatcaatcctctcaaaccttactgctgctttgtcaacatactttatgtaatattctgaatcttttattgtcattcaacaacattcacagcatcttcaccagaagtagattccatctcaagaaaccactttcatctgcagttacttcctccactgaagtcttcaacccctataggaagtcatccatgaaggttagactcaacttctcccaaactcctgttaatattgatattttggcctcctcccatgaatcatgaatcttcttaatgttatctagaataattactcttatccagaaggttttcaatttactttgcccagatccatcagaggaatcactatttatatactttaagagctatggtcttatgaaatgcacttcttaaataataagacttgaaggttgaaattacttcttgatccatgggctgcagaatggatgttgtgttaccaggcatcaaaacaacattaatctccttgtatatcttcatcagagctcttgagtgaccaggtgcattgtcaattaccagtaatattttgaaagggatctttttttctgagcagtaggtctcaacaatgggcttaacatagtaacccatgctgtaaacagatgtactgtgatccaggctttgttgttccatttatggagcacaggcagagtagacttagcataattcttaagagccctacaattttttggaatggtaaatgagcactgacttcaagttaaagttaccacttgcattagctcctaacaaagagtcagcctgttttttaaagccttgaagccagccattgacttctctctagctatgaaagttctagatggcatcttcttccaatcagaggcgatttcatccacattgaaaatctgttttgaagtatagtcaccttcatcaatgatcttagctagatcttctgcataacttgctgcagcttctccatcagcacttgctgcttcatgttgcatttttttttttttttttttttgagcagcagcaagatttattgcaaagaacgaaagaacaaagcttccacagcgtggaaggggacccgagcgggttgccctcatcttgcacttttatgttatggagatggcttctttccttaaacttcatgaacctttgctagattcaaagttttattctgcattttctttacctctctcagcctttatagaattgaagagagttagggactggcttaagaacagactttggcttaaggaaatgttgtggctaatttgatcttctctccaggctactaaaactttctacatatgaacataaagctgttttgctttttttttttaatcattcgtgtgttcactgtagtagcattttaaatttccttcacgatctttttctttgcagtatagttggctgtttggcacaagaggcttagttttcagcctgtcttggctttcaacacgcttttctcactaagtctaatcatttctagcttttaagttaaagtgagagacatgcaactcttcctttcacttgaactcttagaggccattgtgggattattaatttaacgttgtatctcggggaatagggaagctccaggggagggcgagagatgagggaaggccaatcaatggagcagtcagaacacacacatctatcaattaagtttttcatattttatgggcatggtttgtggtgccccaaagcaattacaaaagtaacgtcaaagattactgattactgattactgatcaccataacagatgaaaaatgtttaaaaacattgcaagaattacccagatgtgacacagagacatgatttgagctcatgctgttggagaaacagcacggctagccttgcttgatgcagggttgccacaaacgttcagtttgtaaagatcacagtatgtgtgaagcacagtaaagcaaagcacaataagaggaagtatgctggccgggcgcggtggttcacgcctgtaatcccagcactttgggaggccgaggcgggcggatcacgaggtcaggagatggagaccatcctggctaacagggtgaaaccccgtctctactaaaaatacaaaaaattagctgggcatggtggcgggcacctgtagtcccagctacttgggaggctgaggcaggagaatggcgtgaacccgggaggcggagcttgcagtgagccgagatagtgccactgcactccagcctgggcgacagagggagattccgtctcaaaaaaaaaaaaaaaaaaaaaaaaaaaaaaaaaaaaaaaaagtaagtgtgcttgtaaatcatagagatgtggctttaacccatggacaactgagaaatgcattgcttaatttccattcagggattttctatttgtctttctaatattgattcctagctttaatccactgtttgcaaagagtattctctgtgatttcagtcatttataatgtgtcaagaccttacttgtggcccagcatgtagccaattttggtgaatacatttgaaaaaaaaatgtgtattttgcaatttttgaggtcaccgtttttcaaatattgactaatatattaattaggtcaaattggttaattttgtaatttaaatctatatttctacttttttctgctggttgtgtaagttaccaagaaagatgttttaaattaagactttgattgtgatttttaaaatttatcttgatgctattaaatgtgtacatatttggaaaggtaaattatgaagtatttatatctttagtagcacttcttgcttatatttctataaagtactatagctatactctttctttctttgtttctttctctttctttttcctccttccttcctctttctttccctttcccttttccttttcctttttcctttccttttctttccttcatcctttccctttccttccttgttttctttccttcctcttctcccctcctttcccctcccctcttctcccctcccctcttctcccttcctctcccctccccttctctcccccctccccttttttccccctcccctctcccctcccctctcctttttcctcctcccctctcccctcccctcccctccccacctctcctctcctccacaaccatagctcactgctgcctcaacttcctgggttcaagtgatcctcttgtctcagcctctagtagctataaagtattatgtattgatagtaatattgctacaccagctttgtcttggtagagtttgtgtgatatatatgtatctatctttttacttttagcctttctgtactcttgatttcaaagtgtgtctcttgcatacagcaaagagttagaatatatctattaatacagtatgatgtttattttcttttaattgcaatatttggtcagtttatatattatggtaattattgatatgtttaagattacatctttaatcttaccatttctttctattattatttattgctcttttttcctccttcttttgggaatcaagtaatttttaaaattattttttctcctctattagcttattagcagtatgttctttagtttttttgtttgtttgtttatttttagtagctactgcaaggattacattgtacctaataagggactatttgtacttatacaagaatgcaagagtcctaggacactttaattctattcctctcttttacttttgtgctaatagtctatatttgaaatctacatttattttatatcccacacaacattctaattttataaaattagtatttctttaggtttatctatatatttaccctttctatatgtctgtgtttccatctggaatcatttttcttatgcctaaatgactcttgagaaatttggtgtgattctgttggaattaattctctcagttttttactgaaaatattttatctcaccttcattttaaaaattctaattaaacttttatcttgaaataaatgtagattcacatacagttgtaagaataatacagagagaacccatatgccttttacccattttcttccaaaggtaacatcttgcaaaactgcagtgcaaaattacaatcaggatattgatattgatacagtcaagatacagaaggtgtccagtgcacaagggtcctacttgccaccctttatagccagcgtactttcctggcttccctacctgctccttaaccccttgcaactactcatctattttttatttcgataattttgtcatttcaagaatgttacggaagtggattcatacagtgtgtgaacttttgagacttgtttttctgctctgtaaaattctctagatattcatgctggcttttgtatgcataagtcgttcattcaattttagtactaagtagtattccattgtgtggatatagtacagttcatttactcattcatccacccaaagcctctgggtggttcccagttctcggctgtcacaaagctagctgctataagcaagcaggttcaggtttttgtgttagcgtgtcttcgtttctctggaatgtccaagtgcaattgctgagttgcatgatagtaacttgtttaatttttcaaagcaactggcaaattgtttttcatagtatctttattagtttacattcccaccagcaatgaatgaataagtttctctgcatccttgctggcatttggtagtgtcactattttttattttagctattctgatctcattatggttttaacttgaatttccctaatggttaatgatgttgaaaatttttttttatacttgtttgttatctgtgtatattctttgataaaatgtctcttcatgtcttttgtctattctctagttggattgtgtgttttactgttgagttttgagagttctttatatgtcctagatatgagtcctttgtcaaatatttgatttgcaaatatttccccaccagcctgtagcttgtcttttcatcttcttaacaggtccttgtctatattatcaattacttattttgtagattatgattttggtgttgttccagtaccatatgttgaaaaaaatattcttcttccattgaattgcctttgcagatttgtcaaaaatccattggtcatatttatgtggtgagctattgggttctccattctgttccattgatgtacatgtctgtccctatgccagtatcccacagtcttgatcatcgtagctatataatatgttctgaaatcagctagactgatggcttccattttattcctttttttcaaagttatttcagctatttatttcctttctttttcaaaataaatttcagaataattttatatatatctgtaacaaatcttgctgagattttgattagaattgtgttaattctgtaaatcagttagaggttagttgatatctttgctatgttgaatctttcaatctataaacatggcatctgtctccatttatttgaaccttctttgatttctttcattggcattttgtagttttcagaatacaagtcctgtacctgttttgttagatttatacttatttcatttgggtttgagcagttgtaaatggcactgtattttaaaattcagtctctacatgttcattactagtgtagagaaatacaattgattttcaggtttatcttgtatcctgtgatcttttcaaactcatctattagttacaggaagttttgtttgttttgcagattccttggggtttcctatatagataatcatttcatccacaaatgaaacagttttatttcttcctttccaaactgtatgcctttaagttttttccttaccttattgaaatggctagaacttttggcatgctgttgaatcagtggtgagagtgtacatccttacctggttcctaatcttaaggagaaaatatttactctcactattaagtataaaattagccgtatacttttggtagatactttttatcaagataaggacattcctctcactcatttttctgtgagtttttatcatgaattgtgttgaatttcttctaggactttgaagacataaaagatttttttttatagtcccatgggtctcagaagctctgtttcttattttatttaatttattttttgcagtctgtagtcttcttgggaacagaagacactcctcttttttttttttgagatggagtctcactgtatcaccaggctggagtgcagtggcatgatctcggctcactgctacctctgcctcccaggttcaagcgattctcctgcctcagcttccggattagctgggactacaggtgcaggccaccacacccagctaatttttgtatttttagtaaagacagtgtttcaccatgttggccaggatggtctcaatctcttgacctcgtgatctgcctgctttggccacccaaagtgctagattacaggcatgagccaccacacttggcctccacattcatttttaaagaacattttctctgtatatataataaaaaatttgcactttttccttttgtcatttcaaagtttattatttcattatcttctggatttgacagtttctgttgaaaagtcttttgttgctcctttaaagttaatgtggtgtttttatcttgctgtttttaagatttttggcattgtctttagtttttagcaggttgattatgaggtttctaggtgtgattttctttatagttatttatccttttggcggtatatagaactttttaaatttgttgttttgcgttgcaaaccccaaacatttgagacaggtctcagttaatttagaaagtttattttgccaaggttgagggcacatgcccatgacacagcctcaggaagtcctgataacatgtgcccaaggacatcagggcacagcctagttttataaattttagggagacatgagacatcaatcaatatatgtaagaagtacattggttccatccagaaaggcggggataactcaaagtagggaggggcttccaggtcacaggtaggagagagacaaatggttgcattcttttgggtttttgataagcctttccgaaggaggcaatcagaaaatgcatctatctcagtgagcagagggatgactttgaataaaatgggagacaggtttggcctgagcagtttccagcttgaattttcctttcagcttcgtgattttgggggcccaagatattttcctttcacggtgtctttttgtaagttttgaaaatttcttcattctcttcaaatattgcttattctttatgctccttttctctcatctttcaaattcacattagcctttcatcatattccaatgtctcttacatttttctgtattttctattcttcttatcatgcttcagtctagatattgtctgctgatctgtctctttcattagttttctttttttgtgtatgttctctgctcttaaacccatctattgtacttttaccttccattgtattttttagtgacttaattttaatattttccttttttaaaatttcatttttgcgtgaggattctccagtttgccatatattttcttgaacatacaaattagagttattttaaagtccctgtctgatgattacagaaaatgaataacttgagtctacctatattgcctattttttcctcagagattgtggtcagttagacctatttcctggcatgcttagtgatttgggattgaattgaaaatggtgtatgaaaaattttagaggttctgaaagatgtcatcttcctttaaagagggtcgatttttctggaaggtagtcagaaagggggaaaattatcttgatccaattagagagtgtaatgattctagggtggatcctggcttttgtgagtcctcatctatttcctgtttttcatttcttctaggacttagcctttcagttttgagatatgaaaacttaggtttaccaggttccaactccttggagaatctgaactataattttggtctccctgtcactacacgactgccaaactctgcctttctgttttagcctctttgctgcattttgtgcttcacttcttgtcctcttgtcttatgccgtttaggaattgggaaatgcttcaaggggaaaacggtacagattgttggaatatcttctctgtgattccatttttttctctctgtctacaatcttagtccctcaagtcttgaatgcatttaaatatttgtactccaatttttctctcttcagcttctgagaatgctaaaagccccacaccacttaagaatcatccaataatttaagaagaaaagcagtgggaaatgcagagtctatacctcagtgcttcactgaatgtttgtgtcttccccaaattcatatgttgaaaccctaacccacaaagtgatggtgttaggaggtgggcctttttgggaggttgttagatcataagggtagtgccctcataaatgggataaatttccttataaaagaggccctaaatagctgtcttcgtcctgtgtgcctgtcctaccatgtgaagactcagcttgaaggcgccatctaggaagcaggaaatgggctctcacaagagaccacatctgtaggagccttgatcttggacttcccagcctccagaactatgagacatacatttctgttgtttataagctacctagttaatggtattttgttatagcagtccaaatggaataagacgctcaatatattttccttttatctgagaccctggcacttaaaatttttgctgcctctgccactctttgatgtcttccagccattaaaaatatatatctagctagctatttttgttatttcagtgagagtattggtttgaacacatgctacttcatcatagtgggaaacagaactcacccaagcctgtgcattctaaatattgcttcagctaagactataataatttaggcatagttgtattcaggacattttctctagtttactttgcccattttccttgattcaaatttttctgactagattattttcttgccatagaactttgtaggccaaagatagattaagatctttagagttccaagatgaagaaaagacaagttggccttctccctttcacaaaaaatttaaaaataaaaacaaccctacagtgtaaaacaaacatgagaaataattcaattttttctaaaagcatatcaaatgtaaattatttccaaaattttacagagctaagcttcctgagtataaatcctggctctgctatgcagtaggtaggcaaattacttcatctctctcttcagtttcttcaattgtgaaatatggaatagtgcctgcctcataggattattatagtaaatgatttaataaatgtatagtacttagaaaaatgttccacatgtagtaagcactcgatgtcagttaatgtaaaaattttccaacatcaacagcaagaaccgttaaatacatccacatataacttacatgtactcataacaaatatttatttatttatgtatgagtagggttaagtttgatttacttggagccatccagttttagaaaagtttatgataactcaacatttttgttctttcttttttcttcttttcctttttttgaggttgggggttggagagaggctctcttccctattagtaggaagaaaaaggaaccatttctttctactcttcaacatttatttcccaatagttgagtcattcaacatggattgaggattcactgtgttctgggttgtgtgctaactgtagtgttgtacagatgaataagatttcatcctttccctgaagatctttgtaggcttatcagagtcagacagataaagaagaaatgacatacacacttgagccatctaccctgtggcaaggtgtcagaattttataatatattaactttattatcctccaaacaaccttaagatgtaggtactgcagctcagaggacttaagtagcttgctcaaggtccagccataaaaagatgaaatttgaacccagtagctctaaacagtaggtccaggcctgcccattaacgttaagacagaggagacagcaacatccctatgtacaaacatcgacaaaagactggttagaattgcatgacccaaaccacctgttagttcaggtgtgtgagcccaggtcagactgcttgtttagtggcatttaccagttatttctggcaaagtggtcaaactaataataggcagccttgacatttttacaaagagtgaaaaataagatgcagaactatttttgaatggatatttttaaatttggtgaatcattttcaccttaaaaaatgacttgtcaattagaaaataaaatggcacatattctcttcagtgtagtgggctgtgattggagaaagctctcatgtgtatttcctgtgatactttcaactacatttgggttaattaaccaaattggtaggaatctgagctctaaagagatcaccatcatgccttcaacctcacagaagactggtagcttccttcactctaagaggaaattctaaacctaggtagtttgcaaaggaaaatgagtaggtaggcaaattacttaatctctctcttcagtttctggttgaagcatgttgtagaaaaaaagggctacatgcacccacttttcattttgaaggtcagttcactgcattttttttttttttttttgagacggagtctcactctgtcacccaggctggagtgcagtggcatgatcttggctcactgcaacctccacctcccaggttcaagcgatcctcctgcctcagcctcctgagtagctgggaatacaggcatgtgccaccatgcctggctaattttttgtatttttaatagagacggggtttcaccgtgttagccaggatggtcttgatctcctgaccttgtgatccaccggcctcagcctcccaaagtgctggtattacaggcgtgagccaccatgcccagccagttcactgaatattttaatagttcactgaatattttaatactgcccaaggcagtataaagtatacttagtcttaaaaatgctaaaccagtcaaagtaaaagtgttggttttttgctaattttcaaattaatccatttaaagtcctgaattttaggcatttttttttttttttagaactgagaacttcttatttcagaagacatcacctattagcagaatgtggcactgcagtttttctctcttaaatgctaaagctgcataaagaggaggaagaattaattaggcagctatggattagagccagagagatggtaaattaagcagctcagagaacgtgggtccagggaaagctagaagggtatgtttctctgcctcttccggttccctcatttgtatgatgtgcatttctgaacataaaagcagaacaataattggaacaaattgtcagtttatgaattgtggctgttggtgaaatctgcccctagtgaggctttaggtagacattggattccattgtccttgttcaaacaggtaaattcccagctgtcattaatctgaaattaaaggaggaaagttccttatagtttgatttcggttttgcagtgccacagctaatcgcatcaggaaaataactttttaaataaaaatctatcttttctcccaattggggctgggacagaaataaaggaagatgaaaaggaggatggagtaggacgattctatgaccaagtgatttgaacattagtcttattattaaagaagcaatttctgattctactaaagaaatttcattcttttacagtgacacaaatgtaatctgcctggctgacttaggttccatttatattttgtagcaccccagagctactcttttttatttatttatttattttaagaaacagaatagaagtcgttataagcctagcatataaaggtccttagggttttgagggcagtctcttctcccctgccttttaactccttgtcctttgtttgggcatacattttctgaatgtctttttcagagtaccttcttgtgagtttcattgattttgtttaatcggcttcccattaattaagaaagagaattaactgggaaataggcacgtgtgcagagttaaaagtaagctagggtcgtcgtaaaggaaataaagctgatgttagaaaacatgtgagataaccctttcattctatggctctgggctttcattacactttgtgtttgtggaacactggccctgtttactcaatgttgagtctcagcaaaggggtgtggatgagaggactcaagaggggagcatttggcacccgtatggccccaaagcacagttttcagcttactcacatggttattttaaagtaacactgttttgaaactccttcggtcctcatttttacctagacattttacagtacaggaatcctgaatttatgttatctgatgtctacatcctacttggtgtcaggatcattagactgtcttacctgtctctgagtcataagccactgtcatgaacccaagccactgttttttatttttctttccatcacaagcatggtctcagtatatccatgtagactctgatatagtttttaaaatacattttcttccaacccctccccctgagcttctgtttttatatatttgcttgcaaataagtttaattggctaagaaaactactccagaatttttcagtttctttccttttgttatagagaaagagagagagagagacatgcttcatgctgatggtagtgaaacaaatgagaacttcagggtggcatatattttcctgcaagtaactgtagagaaaagacaccaaagccttaaagaggaaagttgtaggcattctggagtcacaacttcgggggttgaggttgtcaaggagctgtccgtgatggttctatggtgtgtgcgtacacacatactctctctctcacacacacacaccacagtgacagatgacctattgaaataatttcagagccggtctgtggttgctacgacaaccaatgatctcttggctttcatctggccatgtgacagggactttgacgtcagctagaggcagagtctgtggctgagtccacacagtcaaaggcttgtgagaatctggtggatgctggaccttgctgctgctgctactgctgtttccaggggctgcagagcatggactgttaaatcttgcacttcttctgagtgaggtaattagtttgctttatatacaatagttagatgtttttatagctcattgtggttttcccctctctcttacctcctacaagtttgtattcatgagcaattattgttgtaccaaggggaaaatgtgaagcagcttctagttgtgaatttcaggcaggttctctggaatttggttaaatttggattaatgttttgtgaagtaggttaaaatataatcgtcttgcttgctcaacacttgctaacataacattatttagacatacggattttgcagcttgagccaaatattctctcttgaattccaggaatcctcccttcagtattgttttgggtttaaaaactccagcatagccttgcaatgtgtttctaacttttctttttacaattgctactcaattctgaatcagcctaaaatagtttggaatttggtttctatcttgtttgcagcattcatatttagcaacaataggaaccacgggaaataacattataactgaaacaaaagttgggattttgcttgtaagtaaaacctttggtattctgaaagtaccaggaaaaattgtcaacagtttcctgtttagagagaaataatcgggaatatgccaaggaagttggggtggaaccttttacatgtgtgcatgcaattgctttttggttgttagagcaaagtgcatatttccagtatcctcccctgaaaattcagctgtgaagagaatggcatgaggtggtctttactaaggagtcatgtaagctgttgttatttttaaaaatcgtcataattacctaaagaaaaaaacaatagccctaaaatgaaaagtatcattgacacaagttctactttaactcaaacacagatagaagtagtcactcacaatttgctctggatcttaaatgaataatttgataactgtgattaataagaatttttatctctttattcctataatactatttactacaaattgttttctttgtattgtagttcctttccttcccaagtttagtaatttcagattttctttcatgacatacaggttgaattgttttggagcttctaatttaaagaatacctgtagtactgaagttagccaaagtctagatttataaccaggtgtctaaatcttacaagtttaacagaaaaaggggcaaattttagagcactacatgtaatacagctagtattttaattagtagaagaaactggtttaactgtatatatgaataccatatattcacagtgtgtgaattatatcgtaatttagtgcaagaatatattgttttaatttttatgttctttattagtttcagaattctaatagcatttattttactcttggaggtgaaaaattttgaacagtatttagctacagtaataagtgaataactgtgggtatatcaataatttctcagtagctttcaatgagtgaatattcatttaacttgctggcatttgacatgtctgtttttggtcagggtctccgtggaggattttccaaaagtctaatgtgctttcattccaggcacatctactgagacataatctcatcacttaattgatctcaaaattataataacccagaggccatattcttaacacccctagaaaaatgataatttatatgtaacatttcagttgagcacagataagaccagtagcaccgtcatttaacagcactatctttgatgaggtacactttgacatttacttcttttactcaaaatgtggaattatcattatagtttttccaggtagcagagattttcttggtgctgtctctatgacattttaaattaaagtcttataataattgtattcaatgctctttcaaaatagactatatttcagcggtatgaaatacaagagaataattcagcgttgatggcaaaatctcaatgatgaagtttatcactaaaagaaaacaacctatgctgtgaaagcagagatgctctagaatctacaggtcttttcctatgggaaaataagagaaaaaaagactgtcatcagaatcattttacagcattgagactatgttgatttcaaggtcatgtttgttgcagcttcaaaagatgctggcaaggaacgaggtactctagaaacctggctgttgcattattaaatattttgtgtatagtttcggacattcttaacccgtttggtgctgtggacctctttggcagcctggtgaagcctatgtacttttctcagaattatgtttttacatgcataaaataaagtatgcaggtttacaaatcaaaccactttcattcattgaaaaacgttaactaaattttacaaaattgtgatacatgctttgttagtaacacattattacataatacaaactaacagcagttataataactaccataactaccataattttgaagtaatggtgagcataaaagatatttcaggatatctacaacaactgtaaaatgaggtgaaaatatctgtgatttctcttggcaacaatatcacaggtgctgtggcttgtggcctacattttaattgaaggaaatactaaatttcagtttgaggttagtgaaactaaagatataatatttttcccaaccaagttccccaggccctcttgaattttatccacccctgagtcaattgatatgtacgttagtgatgccaaaaggtgatagaactgcactggacaaaacccatcaccccatttccacattcggttccaccgcatcggattttattcttcgagtgtgtgaattttgcaatgttctctaaattctgcatgaaaaggaataatatgttcacatagctaccaaattgtaactttcttttattttcctccttgagatccattaacaacagtcttatgtcccctggattgggaaacccttacctggttagacaggggttaagaggaaaactcatagtgttagtacaagttatgcgagttaaaaccatgggccacagaaggtagttcatgtgctcatagcatttgaagcaagcattaaagaatgcatgtggctttccagcttaatgtaaagcacatacacgtgtgaattgatcaattgtcatgttaattccagatactcaagagagagccctaaaggtttatctgacagaggtctctaggatgaggcatgtttgaaattaagctggaagtggagacacttcccaagtatctgaatgcagaaccttatttggcttattggatatttaagaccaatacagggggtattaatagtattgtttagtgtgacttatgtaagtagttgtctcattcaacatgtttctttaaatgtgcagaaaatagtgcctgatattcctctccaaaccaacagcgtaactttgcagttggtcagctgccgtcacagccctatattcagaatgtccaaagtcatcctttctatgacatcaacacccactgtctccgcgtaagagaatgggagctatgacattttgcacaagctgttgtttaaattcaatccaaatccctcgcatttgaaatggaagcttagcaatttgtcttcgtgtgttctcaaaggaattacgaaagagatgttctcaaacgtttcttattctttggattagaaaagaacacttgccttgggagctttgagtctctagcaacttgataaagaaacttggaaaaagtttaaaatctctgactccaggctgtactgtttgcttctcaagccaggtgtttgaaacttttcaaaaaggaatgtgccattatttttcataaaatccacatttatttaactggtgcttcatgatggaaatctaactagaaatagcattccaaaatgtagtattttttattgttttcagaagtgataccataaaagttaatgttcactaagattttgatataaaaattatatgataaatattgaaattcactggagccaaactaaaaacagtctgccctttttatctcagtagtgaactttagggggttttttgcatgtattttcataagtgcctttaaataaagacacggcatccctttaaaatttagtttacattaatgtaaaccagaatattctcaggtcacaatgcagttttatatttgatttgtaggaaataaatctctagcctgaaagacattccagctgttgcctgtcttcatgggaggattgttcacattttctgaatctctcccagtgactgcaggaagaccaaaggctgcacattgcttttatgcaaggatgaatttttttaaaagatgattttggattttgtttgctttaatgaatttaagccctatctattagaggtaaatgtcaagaaaactgttgtgttctttggctatctgctctgctgactcccacagactttgatatgattcatataactcaaaccatgatcaggtttgtgacgaccatatttacaatatcgttggagatcaaaaatagcatctcacaaaagtttccccgtcctataccttcccacatcttatcatggatcatgtgcagcacagtcactcaattggcgaacatttattaacggactactgcattcacagtattatagtaggcatgtgaggtcctcccctgatgggatcctcaagtgagatatgctgctggcatagagaacccaagggcctttatggaccctggcttttgtttgcttgagcttttattcaaacattcagtctttcatgcattcagcaaattttgagcacatactacgtgtcaggcattgagccagaccccagggttgctataaggtacaagacagggcaggtcccttccatcatggaatatgcagtctaactatgtagagaacttgcccagagacctatatgtactattaactggggttctctttcccacagccacactggccactgcagtccaaaagagaattctaaaaggaaacagtacaaaacagaacatcaaaacaaaacagacaaacaacctgggaaccattaggttttacaccagagtgaaaccccagaagagacattctgcagctggtgaacagccggcctcatttgtgagcaatctgttcccatcagtgtcagggattccaggtcggtatgctcagtcctattcccagttggccagaggctatttgtcctctagttcagaagacaaatgagactggtagggaccgacctagagagtattttcttttatgcaaataccctgtttcatacaaataatgaaaaccattgtattttatgaaaggagtctttaaattagtgatatttccaaaaatatctctcccgtcttccctgtactaacccagtcaggacagggtcactgctgtaataaatagcccccaatcttaatggcataatccaacactgttcatttttcactcacccagaaatcaggattgggcgaagggctctgctccacacagtcctccagggactcaggctccttctatctagttaaactgatcaggggcctgtttctaccacttgctagtgatactctgagcaagttacctaaatcagagttttcttatgtgaataatattagggcatccctcttggatttttgagtcaatttacttggcatagaaactgacaggtattaggtactcaataatgtgaactgctgttattaatcttctacttctggtagtgctgccaccaccatcccccgaggaggcaggaagaatccgtcagaattggaagagtattataataatagctaacacttaggaagctggatagtcttcaaagttcttttcaaagtaactattttttaacaacattctagttttataaatgaggaaattgaggcacagagagcttaaacaaattgctgagtgtcacacaagtatacaatagagctctaggcatttggcttcagagtcctggctctttattcactatactatattgcctttcaacttggaatatacagcagagcctcaaataccgtcatttcattcaacatcgttttgttgtaatgttaatgagaaaaaataattggttttgttgtcaatgatgttgtgaggacttactattatatattgtattttccccagaattaatgttatatgttgtggcagattgtattcaaaaatagccttacaattgaatccattaccacattaaaaaaatttttttttagagatgggttctcactctgttgcccaggctgaagtgcagtggtgtaatcatagctcactgtaacctcaaacctgggctcaagcaatcatcccacctcagctgcttgagtagccaggactataggcgtatgccaccatgcccagctaaatttttgtttttatttttatagacttggggtctcactatgttgcccaggctggtcttgaactcctgtcctcaagagatcctcccaccttggcttcccaaagggctgagattacaggcatgagccactgcattaccatatgttcttctagaatcttgctcctctccatcaggaggtgaagtctattgcccctccctttgaacctaaatgggcttatgattggtccaactgatagagtacagtggaaataatgctaggtgacttccaaggatagatcataaaaagaatacaatttttttctctcttgctattctttttcttcttgacattttcccttagaatccagtcaccatattgtaggaaacccagaccacatagagaggccaagagtaggtatttcagccaacatctcttgctaaagtctcagccgacatccagcatcaactggcaggcatgtgagtgagcaagctgtcagatgactccaggcccggtcatcaggtcttccttccccctcctgatgccagggaatcacagatgcactatccctgctgagctctgccccaggttgcagtttcatggacaaaataaaagttgttactgttttaagcccgtaagatttggggtgtgggggggtaatttcttaggcaatcagagtaactgggacatttgggtaattagaaatgagtgaaatgcctgtgtagagggctaaacttcaggtacatatggattattaaatagacttttgtgatttggcctaacctaacctaatttctggaggaaaatatatttctgttaccaaccaaattacaaatgagcttttggaaatttggaacaatgtcctacaggttaatgctgttgctggttctaggaaaagatttgggctacactgaggccagactgcatgccttagcaagatctcgctcattggcccccactgactgggaccctccctgcaggagagtgcagtgtggatggcagtactcgtatcatctgtcctagaccatcataggacatgctcagtcctccttgtccactttgtctccctctcccatacctactctgtctaaattgctgcctacttttctattgttagaaactgctgtatctttgacactattttggcccatttcctatgcttctagggcaatgttttctgctctactggtttgtagtaaagctagggtattctccttagccaggtaaaatttagctaattcaacaaaatcttatgcctcttaacaaaattgccaaaatggcagctgtcccattggtctgtggctccatgtgttggtcaaatctagcatttgaaatcctcagaaatgtggtccttgtgtccttactcaaagaggcatccctttcccttctgctgtagagaaatcaatgccccaactctcttctcacttacttaaacttcaccccatcctaatagtctactcctcttcccttaagaagactctcattcatttattcattcagcatttgttaactctgtacagtgagccctagagttaagtgcctatgaaaatattcctttcatgtccaaggactgctaaggtttctccagctgttcctcatttgcttaccatagacacagggcagatgtggtgcaatcacccagacttttcaataaccgggatatatcccatctcatccaagatatttcagctaagtaggatactgcatgagtaatataggaccagccagtctttgaaaaggtaacagtctagttaggaaggctggatggcatctgcatttgagggccagagctacgtcttccacactggctacaacttcccacagtgcccagcatcatgcaggacatacagtgcctcctctttacatctctgttaggtgattagtgaacagattaaccccagaggatatatggcattgagatgactttggagaggaagtgagctttgagttgggcctaaaggatagagagcgtctggcatgaggagcaaaagtgaaaggataatccttcattgagaagcatgatgagaacattctagtgacagaaataggacacctccccacctggagtcaagaacatggttgggaaaaggaaaaaatatataatctatatggtgggtccatggaggatctaggatttatccacttaagctggatttgatctgatagacactaggaagctggggaaagctgggagcagggaagtgatgtacatgttaagtggggtgagaatattttagtgactctgtttctttacacagctcatttaaatccctgaatatgtgctaagtatttttgtccatttttctcatagaaaagttttaacttcttaaattttaagaaatgtgaattatcttttgccctccgtaggtgtgagtagccattttaactttagctgggttatatccgtaggcaaagctgtgtaacttcatagttttaaacatataacctattactcatcaaagtcatactcatataagttccaaaccaaatgaacaagtcaagcctttaaaacattttctataaaactatactataatgagtatacaatgaaaatttatataaatatatattatatgtatatttatatatatataaaacatacaatatatatatactgaaacccctgagacactgcacattattctgaaaaatctttgaatcatgtcaccaatgaaaaattaggttgtgttcagtgaaattttagttgtaagttatgagtgcattgcattacattacacctgaaatctttgaatactgatcatcaatataagtgtctggcaactatcagaatgttcttaaccagagcatgccatctttaagaaaaatattataaattatacatgcaaaaaagtgtatataacatatatgtacaatacaaagaataatagaaaacaaatccctgggtagccaacaaaaacaccatctgttaatcattctagtgaagagtaatgcgttgatattgatgataatttcactctagtagcacacagattagtactgtccctaaggtccaacaccagaagaaattgaatcggtgatatgttttttaactatttgatcacataaagattttaaaccagttgagtcatttatttcagtctctgatggtgaatgaaaggtatgttttccacttacaaaacatcacttgctattgctgctggcaattgtgaaggtttgtaaattggtttttgtgtcgagaggcctttgccccaaggccattgcccatgttgtgctccttgtcacctcccagctattcaggagggaatggtgagggaacccttggtgagccctgagctcttggtacaagatctgtatacttaagttatttaaaatgaatattaatagaagactaacataagactatctgagtatattactaggactagaaagtctcccaggttgaatgggacaacgtggtaccaaccttggtacaagcccaactgccaggggtagttaaagcaaaccattctctctctcagggtatatatatatattttggtatattcagaatatatttcacaaaatagaagctatttaaccattaaagatgcaatctttggtccaaattccactttgcaaaagaaattgtcattagatctgtttgtgcccaccttgaaaaatgttgatcaacttccaatttttaaaggtcgatctgttactatttagaaatagaactctctttctcctcagactgtcaaaacagcctacggattatagccaaggactatactgttaatgaaccaagagtttattaactgttccatcagcatccccatcaggaggggtattttgttagagtcacaaacagcacaaaacttagttatgctacaggttaactaaaagacactgattttgaaatactgtaaaaaaggaaagttttcactgaaatcatgttatatcatgtctggatttaaaattaacagggactttttttgttgtggtaaaatatgcgtgtaaaatttaccattttagccatctttatgtgtacgtttcagttcactaagtacattcgcattgttgtgcaaccattactattgtacatctccagagctttttcatcttcccaagctgaaactccaaccccattaaactcactccctattcacccctccccatcagcccctgccaaccactgttcttctgtttttaaacagggacattttgagggaatttaaaataaacctgtccttcctcttctcttgcataagctattcaactaataaaatatctgttaaaagtcctaaattaattggaagtttcttaggtttaaacacatgggcaaaatgtacacaaaaaaataaacatctgtttcatgacagatgttttagacctacaacactgggaatgtgttcttgatgttaaaggaaaggagatggtaggctgaagcatgtgttccaaatcacttacttaacccagtgcaatttttatataatcactcaactaaccagccattcaacctgggagactttctagtcctagtaatatacccagatagtcttatgttagtcttctattcatattcattttaaataacttaagtatagaatcaatatatgtttatggttggacatttggaaaacacagaagaatatgaaaaagaaaagaaacatcattcttaatgttttactgtccaaagtaacaactactaatattttaaaattaaaaagcattacgtttaattttactttatttcaacagaagaaaaagaactctgaaatgaaattgaggatttgaacttcacacagctgtttgaagtaagagttactgtttctaactaattttaatttattaaaaattaaagatcaaactttaagagattgaggattaacttaaaaaaacattgtttcataatgagtacaggcttatatttttagttaataaagcttagttaactgtctcaggaagacagaaaagactgcagataatcaaacaaaaatacccttggttgggagaaggggttttaaaacagaattcaaaacctaatcccacctttaggattgttctcttggtgaaaattatataaaaaagggcaatccgtaaggaatatagttcatgaagtcgtaaaccactgcatctagtgaccttcccctttgaccagagaggcttaactttgtttgcttctaataccagtgttttttacattccacaaattgtttaaacacatactacattttagtttgctatatttgggccataattgccctttatgtatatttatttttctaaagtttctaattatctttgtcttctctgacctggagaaactaaaatcttcagtacatatgtggcatgtcatagtttaattgttggtgcttaattattagtcatggtaacctctttcttattgaagatgctctctactaagccctctgtgctaccatttaatgtggactagatttaagctcttctactagaatttctttccatcacaactggattattttcattgtctccacatctacccctttcttagactcattttcaattttgctagagcatatttttaatttttttcaaaataatagaagaagggctgtatctttgtagatcttcattttgccctcataattgaaaaatagacgccaaattactttccatcacaattttatggactttgtttcactgtcttctagcaacctggaaagcagatgcagagtctgctgccattttgattttgattcctttataggtagctccatcccccatccctctcccatgaacttttaggattttcttgttgtacttggaggtaataaattttaccaggaagtgtccagatattttttaaattattattcctcttcaggttttttaaatccaaagattcaaggtttattcagcccagaaaaatattcttctatgatttatttgaagtgttcatctctattttctttgttttctcctctagtagctcttactatggaaacgatactaggtcccttagctctaggagatgttaggtctcttggatctctcctctatggtcttaacttttttcccatattttctttcttcccttttatgtgcattcagaggattttctcaattttgtcttctggatctcaaatttatttttgagtcatttcatttcaattattcagactttccactgagcatctttgtaaaatcattttttatatttatgaatgtagacttttctctcaaatatccctaaaagtattactttaaaaaaaaaagttaccttctttgtcctttgttccaactccatttcctttagtatcagatgttctgttgctcttctggatccttctttcatatgttctatgttttccttcaataaccagtaacttttgactggcccaatcatatttataaatgaagggctgggttgactggcccaatcatatttatgaatgaacgactgtgctgactagtagaggtgactggagggatttctttggcagttacgtaggaatggttttccaccacacttctcttcctgaatggaaaggctggcagttcggctcacaggaggcacatgtgacagtgggaagcagacaggcaagcctgtgactgtcctgactgccaggaccaggaaggctttatttttagggatgaactacttttatgtactgcctttctgtacaaatcttaaaggggagtagaaagagatggaaaacaacattcttcatagtctttttattaattgccttgactgttccttctccctatggctccagacctgaattcttcagggttctgttgagaagaacagctctcatctcttcattagctctctctaaaatctcttttacattgtggtttttgttggctcaatccaaacatatctgttggctattttctataaatttcttaaaatttctgtctgctgatggtaacttttcttgatttccatcccagttcttgatttattctttttcatacacattttccaccacttagttggaatttttgaatgaagaataggcagactgtcatgtctagtctgccatcttgaagagagattttattaacatcagagtggctgccccagtgtgctgatgtatgattggcacgaggccatggtacatgccttactttttataaggctatttctccttctttcatggcccagacagcacccccaaccctgattgaccatatgatcaatatgggtcatttatacaaggagaacaaagtgaaaataggtgggtcacatgagccaattccattcatcagatccacaatatctgcctcaaccaggtactgtatcattcttcaggactccactgagtcccattcctaacttccccagtactcctgtcaaatacaaacctaaattagaccactaaccatacagttctacaattttctgtctgtcttctccattaagctacaagctttctgaatgtaaacatggtgtctcatttcatatctgtgtcctcagtgcaccccacggggactgggattaagtacccaacacagactgaataactcagggactgaatgaatgaacaaagaaatgagcaagcttgatgttgacctgggaaacaggtgtgttgtctttctttgctgatggggctagtgacctcctttttagtcatgtgaagctttggaggagggtgtttcaggcagaaggagcagtatggatgaaggcccagtggcaaactgggacatgtcttttggggggagactggtggaaattgttcccaaagggctgttgattattaattcatccaaagaaaatctctaatctctgttgtatcctcttctgcagagtggtagtctgactacagggttcttatctttgccagttcagtgagtgcaggtctaaatagagctgttttgttttagcagaaaggttgcgtccgcagttcaataggtgtcagtaaatgctctttcatggttctatataatcatgatttaaaacctacatcagtcttctttgcaaatgtacattaaagcatctgcttatacttgtattaagtagcattacttgtactaagtcctcacttcacagggacattatgaaatcacagacagcttagaatggagctttcaagttgtccttgggcccctgttgcctgctggaatggataaagcatgaccccctcagccaacaagctctgctgcttgttgtgatgtttggtagaacttccttgctccaatgcctccgactccagtcaccatctgaaagtcctccccagaggttggagtgctttgcctcctatttctgcaaacttaatattaaaaaaaaaattactggttgtcaaaaggaagcaggctgttaattcctggttaattgaaattagtcttgtaatttttagatgtgttattctattcacaaagcaggtacctgataagtgtttgtcagtgagtgaaagaatgaatgacacattagaggaaagactgggtttgtctttcctgaaattggagttaaggggcacatttgctgggaattatcccaggtaagcacagggatgtgcttttgatcacaggccatttgttctttccattttagccattttcagtctgatcattcatctcttgtctttgggaataattaatttcaggttttagaacattactaaagacatctcagtggagttcttttgtttgtctataacaggattgtctggggttcatgctgttcccaaggatctcactcctcacttgatgaggcagagaccctgactccaagggcgtacccatcacatccccaacttctcagcatcaaactgggtttgtttaagaatgaagccactagcattagaagtgtgacagtataagacaggatattctcagttgtatgactcaggagccaccttggcaaccatcagtgaaatgctaggttatcctaataggctagtgaggtcttggaatgctaagtgtaaagtcagtggcataaagggacacgttctcagcagcccttgatgaagtcaagactagggacaccaggagagaaatggctgcatgaaggttgcacaggcagagaagataaggttctcatattactccaacctccatctggatctgagctgctgggtcagtggagaggagcaccagcccaaactgatcccccagggctcttggttggaatcttcccagaagcctgaggggagaggtataatgtctaaacacagggccctccagtcactggcatcagaatcagagccacagcagtgtggttgaaagaggcagattcctaaggccaaattcagaacttttgaatcagaatctacagaggtggggcttgggatctgcctctataaaacctgtggtgattcttaacgcacaccagctaaacgttgagagcctcctgtacctcctaatctctataggtatctcgagctgtggacagattgccaagcaccagaaattttagccaagcacatgtgcggttggcacataacatgagaggcaagttctgtgcccttgaatttaacaagtagtgctggaatacaggcactatgttaggccttgatggcaattcttgcctttaggggacagtaagttatgaagtcataatctgtactccgagcccaatgtgatgaaccatatagcatcactaacaactcctgtagtggatttatgccattggtgacaaagagatccgatgccagtaggaagttctcagtccagatcactacacaactgggaaaacaaccctgagcaagtttcctatttgtgaggagcaacctaaggatgggactaatccacgaagctcccaacagaactggcacagatccccttagtagggctgcccaaaagattgaggctgtcagacctggatatctgggcaccctaagttgacaagtctaaagggcagagagcatgctgcctttgtctttgtcttcctagaagacctagtgcagcattcagcttatagtagatagagagagccattgttaaatggttcttatgcaaacaaggctgacctaggtgctgggccatgtgggaatgtggaagcggagagcccagctagtgggactgacatgccttgggtagatcttctcacattcatggcgcctattgcctccgccatgactcactgcccatgcactccatcacttgtgagacaagatgtgacaagcaggcgctgaaagttgtgccttgtaacctaaatatgtctctttcttttgctctttctaccttcatgggagtaaacctctcttctaatcacacatgagttaatgtaaagttttcagaaattaaatcacatttccccaatggttaacttgatcatttcagagttacatcatcattgtgatttttttttctcctcaagggtaataaattaatgaactatgcacaagggaagtttctattttaagaaagctgtgtgaagtggaagaatactttgttcagttatttctttcatagtaggtctccgccttctttaagctgaagcacacctgtttcaaggaaaacagttggccaacaagacagcattggctttgtgggaatgtgccaaagaaatttcaagatattgtattcttttgattcatattcccaagttgctctccagaggaaatatactagcagaaggagagaatagcagccatttacaggtaattagtgagtctatggtgtatgattcattgaattccattctagatccctatttataattattggagatttcttggcaatgcttaagagacaaattaccaaaatccccttacttgtcatagcagcattttaactttgcataagcggtactccatgaccactgaattagtcatttttcattacctacgtttaaggtatgttaacattagtcctctttaataaatgagaaaacaaagtcctagtaaagttgattctggcccaagagcacataataatcagagtcgtgtccatgattcttaaacctcttcactctgagaaagcacgtgtttttcagcgggaaatagcctcaatgggaggtacataggccaacatttaggaaatgtgtttttatttatataactagtcctatgtttagaaaaggaatattcaactctagtctcacataagaatcagctagagagctttaataaaatgccactgctggggcctctctcacaggagttctgattcatttggtcaagtatgaggcctgggcattggtcttttgaattaggcggggaaaaagcttcctaggtgatgctcaggtgcagggagggttgtgaatcctggtcctggcaaaattctaaatctgaccccacagtttcacccatggtctccaccatcctactattagagcccctgcatgtggaaccttctggaaacttatacaattagcctggcttacagcattttgttatcagagagggaacatttgcacagagtggtttagcagttgagctgtagtagagctagattgctctggcagaggaacagggagagaagaacaaacccacggtattgtgcgctgaactgactggtgagggaggggtgcagctgagaaccctaggctgcctcaggatcatgactggacaagagtgccatgctcccaggcagggcttcttgaagatgagttggtagaccctgatatggaatggaaaatcaagggaggcttcttgattcagagcagcatgccctttgaagtcagactgccggggttcaaatcctggctcaatcactaaagctttgtgactgaagcttgggcaagttacagtctctcaaatgattcatttcctgatttggaaaacagaagtaaaaaattgcaactacttcataatttttggggacaataagatgagataatatatgatataatatactagggtctactcctacccctttctggggtcactggatcaccattaaattctctctattaaaatggggatggaccatgaccctctcctttgaggtaacccattctcacaaggaaatataaggttagatttaagatggtgaaccaaatgttgtcccagaagcaagagatttcatggaaaacaatttagaagggaggcccttggcttcagaatagtagagtagagccatgggacccatgatatgtccttggaccaaagaatgagaacaggtaccaggaggccaaatggcattgtgaccagacttgggtcaaagaacacagaaagcaatcaaagcctgaaattatggagccaagtcctaagagaattgataacccagaaaccaaggaaggtgtccagggctgagggcagtgggttcaggaatagcatgctagagaacaggtagagagttgttttgttctctgcctccttggagagttcgctaagccaaggggttccctgaagtccaaatcttaacaggccattctgacaagtgtgtttgccactaggaagatacgatttctaaatcagagtccttggattctgctctaagactgtgggcctgtcggcatttcccacagtggatcctacagaaggctggttctagggttgttccaggataaacatatttgctagatgaatgaaagttagcatgtttcttaattggaagacttttcagtccttttaatttgcttgtaaacctctaagaggaggatatgataagacacgtttcccaaactagtttgaccatgggacccttcttggcattagaatccccaactcctacagtttttgccatttcaactcaaagcttctgcctttaggctagacccaagtctagtctcaggggtgtgtagaactctctgtgggatgtggcctcattcccaggtccctaccactcaggtagaggcacaagatgaagctgtaaactgagtggaaggcccaggcctgccttgatcatattctgtctggcacataattgcgactcagtgcctatttgtggaataattattcattgaatgaatgggataacctagttcatgccaagctctaattgctgacatagatagtaccttgcgtatatccagggttaagtacccaactgacctgaacttgttggggagatgtgttttcttaggctattttgtatgaaactaagaataataaggcataaattgtcctgatttggtgcctttcttttctcactgatccaaaatgacttcataataaccttgcccatttcacttcaaaacagtcatgaaaatggtttgccaaaattaaactcttcacaaatataaaatataatcctaataatttccttaggcattagatgcatttgttgatgtcctggtaggccctgtagtacctggtctgaacctttgtgaatatctaagcatatggcagtaaagcctgcccccaagcatgttttataaccacagactttgcaagtttaaatggagaagacagatgaaacaagaatgggctattttccttgactgttttatcttgagtaatatttattttgagcagttttctaaataagcaaagcttttcttctatgcttcatgctcctgcatcctaggaatgatgcattttgtgggaatttttgtccaccccacctccaccctgaacttgctgatctggaggtaccatgatgctagctggagtggtccctgccaaggctctgcagagggtcatgtcagacacagtcctagccaaggctctgccttgtgtgggcgccatatcttgttattgtttgtgggtttcatccaactgcacctacccgatagcagttctttttttatttttattttttggagggggtaggtagaaagaaaagaaagtaactttgatataggggtggggaattggaacttagatccacagctacaatagcaaggaaagtgaactaattttgtctgaaccctcttagttgcaagatgtgtttgaattgaagcattaaatttaaaccttattatcacacataacaatgcataaaatacaatggccatattttcttaaccctgcattgtaatacggcctaaagattttatctattttttaaaaaatgtatttatataaacagtcttcaacccgcataaagatgaaaccacatttagttttaaatttaaaaaatcactgtgttgaaaataaaatcatttgaaatcatgacttttgggaaatcttgactgtggctgtctctgccctgtgccttgagagagaaagaaagacttggaagtctgtgctacttgccaagtgtgtcaggagtcctgcttgtcccagatgacagctggcacacacagacaagccactcgctctaactttgttttttcctggtaaagaagtagcaactacttgccagcctgcttcttctttgcaggaagcccccccaggagtttgcatagtcaatctgtcatttgaaatcatttattcagtttaaagcattaccatcagagagtaagaaggaatctgtttataaggagattttagataatggggaaaaatccagaaaaaaaatttacaataatcttgctactgattataacatcatctcttgctgacatttctttaaggggttagtctagtatgtcaagcatatgcagctgcttggagctcttgatttttagaaatgaataatacaagagaaccaactaatgttccttagctcttcaaaccagtctagtacctgcatgaaaacattggttattttggtatccagttggagagcacagggccatgcagcaggatttctgaaaatcaaagctctcttcctgaaatatatggccacaaaggatgcatttctgggatctgatgtttcctggcttattcaaataataatgatggtgttaggaaacttttacaactataggcctcttcttttctttatgctcaatgccaagaacaacaaaagcttcatcaatctgtgaatgatctttgttcatgttagaattccgtctctgagctgttggttctcccatccagggcttgtctgctctcccttcagttaggctggccagcattgatccagagtcctgagaatgtaagtggctcagcctttgttaattaggttacctgattctccgcatccccaggctaattttgtttgagatttcacagtgcttctaaatttatagacgtaaacaaacagggacacacttttcttcaagtcatttattagaatcaaaattaggaagagtttttaaccttcatacagttgagctggtgaaagatgccgttgcaggtaagtgttggaaatgttcgccagtgtctcagcaaaaagaaaaaaaaaaaaggaagaaagaaagaagaaaataaatgtgcatttacttctaatcatgcctgctggttttagttttgtaagctgtgggtcagtgaatcaatgtgagccacttcgaggatggcacgcctaggttattttccaacggaaaggaatatggtctattaggtttggaaatatctagagtatgttcacttaaaagcttataggtagtatattataattcattttctttatgaagagggagaactagagcaattaggacatcactaatgagctgtttgaaatactaggagacattatatggatataaataaattgagcatagaacgtcaagtttaatactggacactatggttatagaacacaagaagtagacattgtattagttttctactgctgctataacaaatcatcccaaatttagtggcctaaaaacaacaaattgattattttacagttctggaggtcagaagcctaaaggtcaacagagcagcctttccctctgagggtctaggggagaagctgtcttcttgacttttccagcttcttgacattgactgccttcctttagctcacagcccacagcactcagaccttgcttccaccatcacctcacctctgactccaaagctcctgcctccctcttaaaagaacctgtgataacactggacacacctgaataatccagaataagaataaccttccctcctcaagattcttaatcagttctgcaaaaatccctttttccctgcaaagcaacccattcacaggtttcagggattaggatgtgaatatctttggaagaccattattctgcctaccacagacattgagatcatagataaattaatttaccccttctttttttaaagtttcttttttctttcttgctttctttctttttttttttttgtttttttgttttttgagatggagtctcactctgtcacccaacctggagtgcagttgcacgatctcagttcattgcatcttccgcctcccgggttcaagcaattctcgtgcctcagcctcccaagtagctgggattataggcatgcaccaccacacctggctaatttttgtatttttagtagagatgaggcttcaccatgttggccaggctggtctcgaacttctcacctcaggtggcccttcggccaccacttccgaaagtgctgggattacaggcctgagtcaccgcaccaggctaatttaccctttctgactggttttctcattggccgccctcctacaactctgaaggagttaattacagctgtgacctgcagatatagactattggtgtgaccatgccatcctgcagccagacttcctgtgagaataagatctgctggtgctgtggactctgctctgtctgagggaaatttctggtgggcactagactgacattttcttcttttccaccagagtcttgcaaatgtaacatgtattatagctcaccactcagaatcaaaagctgattgtggtagagtttataggtaacagggctctagattgaagcagttcaaatgctgagtctcccccttactacatgtgaaatgttgcccaagttccttattttaattatgcctcaatttctgtatctgaaaaacagagatgataacttccagaattgctgtgagattaggaaaataaaatatgcaaagtttttggcacacgcctgacatatagctgttgcccagttactgactatgggcagagtagttcaacaggcctactcttgctctaacctgcagagaacaaacaccaggagtgaagagtggccacaagcagggcagagaaagctgtgggtcaggccacaggcaaagccattccccagttaatccatgaggctgacagctagcattgtgcagggaaagtggaattctgcatttacattgaacttgcagcatttgcagatgcaaagtctaagaacttgtagtaaaacctgggcaaatcccaacatggaatggtaaggatcatgaccttctcaacatcgtagaagagggttagggtccagaggagagaagtccagatcagttgagtccataggcaatttccttagccatcatggttagggctgacaccttatccattagaacatatgcagctgtataatcatcatttgcttgcttactcccaatgaatggaaaataccgtcttatcccagaatgtggcttcagcttcattctcaatagtctactttattgtcatcctaagacctgattttaaaaaccttctccagatgttgttttatgtgtatgtgtgtgtttccattcagtcaatggattctatcaatgaaaaacactagtatttatttattgaatatttactctatgccagttattgtttaagtgctgactgcctaaaatacattttgttacttattacttgcagtatttttattataattctagtacatctattattattttgactttacagataaccaaactgagactgctaaagtctatgtaactggccaaacttacagagattgtaagtggtggaaccaggaggccaagccaggtctgcctgtctctaagctctaggttctggtacctgaagggggaaaactcaactgagaataaaatgatagcaggaacaacaactattactaaaatggaaagatgtccataagtggaaaaaaatgagttacagaactatacatagagtatgattaaattgttgtaaattaaacaggagtgtgtatattatgtgtatgtatacatatatagttttaaaacttctttgcggggccaggcgcagtgacttacgcttgtaatcccagcactttgggaggcccaggtgggcggatcacctgaggtcagaagttcgagaccagcctggccaacatgatgataccctatttctactaaaaatacaaaacaattagccaggcatggtggcatgcgcctgtaatcccagctactcgggaggctgaggcatgagaatcgcttgaacccaggattcagaggttgcagtgggctgagatcactccagcctgggtgacagacagaccccatctcaaaaaacaaaaacaaaaacaacaaacaaagaaacttctttggaaactgatgaaagttatggtcccttttaaaacacttatgtatagatgcacacaaaatttcacacacaacttagaagctcaggttagggatctctgatatgtatgtatcatatataagaaaaatctggaaggatatacaccaaattgttaatcatcccctttaagggataagatttcaagacatttttcatgtattttttatgtttttctgtctggcgaatttgttttcaatgagcttgtattattcctgtaatcaagaaaaacatgttaaagattataaatgaaggccaattgtttccaatttaaaatggaatttactgcttctttttctcctgatgggcaggcttctaacattttcccatgtcatactcagatatgattgggggacctctgaaaaaattcaaaggacacttttgtgaatacactaaatgtgagctattttgtccaaaaagaaactttccctaaaagttaagaataacgaaaataaggagatgttggtgggttgcgggcaagggaccataaagagcatgtgggacaacatcatcagtggcctccactgagaatgacatgtgcacgtgagactttcagtagagttttctatatgagaaacaagggggctttctgactagtaatatgtgccctgtagaactaaacagtaaatgaggttaatgctgcattgcagagcagaagtatatggtagtagagatctgtatgctaagcaaattatccttgagctattgtttgaaatgacctcttaatcttcatttcagctcagtctggcactaattgaaatggctgtttccagggcaccctggtgcttaacgagggagtttccttatgctcttgacctgctcgctgttgcggtccctgccagttgctttgagtttggaagatactttctctcccccttcctactcctccccaacatacacacacccacctgtcttcagcccaggagtccccataagctagataatcaaatcttattctgagcatgaacaaagattccaggagcatcttacttttcaccaagaagaaaatttttaattatgcatgttttttaaaggaatctgtaatattgcagatggatttattcttggtttaatctgatgttttttgcacatgtcggggtttgacaatagccggagaccccagtagttctcattgccaaggatagtgatgagccttcccaaggcattctctctctggaacattgccccgctcagtttaatgcagcaactgcaggaacagcaaatatttatgaagctccttggatccacaccagtgtgctaggtaaaaaaggacaggacttcttttcactcccctgcttaatctgaaaatagaatttgcatgctactgttcgttcccctccttggatgtgatgtaagttctgtttgcctggagtgccgtgtatagaagtctatattaggataactgtattatacatcttgttcctaaaggttggggccacagaaggatacaaatctctttgcatactgctctatacgattaggagcttcctacatactgatgagaatcctgaagattcatatttgcctggtaccttcacatgcctgatcttgccgcaggaggcaggctctatgattagcagactctatcatgggagccaatagactgtagtagtaaaaagtccctgtgttcaagttagaacaacatgagtttaaatcctgacacagccactttctgactgtggttttgtaaagtttctcatgttctttcagcatctgtttccctgcatgaaagataaagatgttaatgtctacattgcaaaactattaggaggattaaattgagtgtcacatgcaaagcacctgccaccacagtgaagtgctccataaatggcagctaatgacattattagcatgctggtagtgctccctttaaaaacaaaacaaaaataacactttctcttgacctctttttccctgccaacaactatcccattttcctgcactccttttaagcaaaggtctttcaaagggggctgtactcattacctctgacttccctcctcatattcatcctaaacccactccaatgggactttggtgccacttctccagtgttatttttcttgtcaaggtcaccagtggccactatattgctaaaaatgcaatggcattttccagtggcagtgaccaacagcagcatttggtacaggggatccccccttcctccttgctgtgatactccccttggtcatgacaccacactttcttggcttcctcctatctcgacagctgctccttctcaatgtctgcagccaaagtctctgatctttagatgttggaggattcagtaattgttcctctttcctatcaatactgattccctcaatgagcacatccagtcttatggctttgaatacagtttttgtgccagtgattcccaaatatatagtaccagttttcaactcagtcccaattccagactcagatccgtccacctactactcgactagaatatctaatgggcatcccaagctcagtgcattatttaaggttctcttgagagacagaccaatagggggtgtgtgtgtgtgtgtgtgtgtgtgtgtgtgtgtgtgtgtgtgtgtgtggagagagagagagaaatttgtcataaagaattggctcatctgattgtggaggtgtgcaagtcccaagatctgcagggtgacttggcaagcgggagacccaggagaggtgatggtgtagttccattccaaaggccagcaggctcaacacccaggaagagccaatgttttagttcaagtctgaaggcaagaaaaaagccaatgtcatggtttgaaggcaatttggcaggagaaattctctgttacttggaggagggtcagatttttgttccattcaggccttcagttgactgaatgaggtccactcacattaggaaagacaactgctttacttagtctgctgactcaaatggtaatctcatccaaaaacaccctcataaaatacccaggataatatttgaccaaatatccgacaccctgtggcccaatcaagttgacacataagatgaacgatcacacacagcacgtctgaaaattagactgtcgatcttttgggcaaatgtgactctgtacctttccctgtcattggttaccaacgtcacccttccagttttagctcaagccaaaaaccttggagtcatttcctcctttcatatctcagttacaacctgtcagaaaattttgtttaccttcaacacctacccagacttcaaccatagcttgccacttgcattgctgccaccctaatttaagccacaatcattgctcaaggagccctgttccagaacaccatatttgaattgctgccaccggtattcctggtctcctttactctaactttatccatagtatttattgttttttaatattccatataattttattaatttttctgtttgcctgagacagaatgcctagcacagtgcctgatatgtagtatacatacactcgataaatatttgttggatgaattgccattgtagagataaagaaactgggacttaaaggaattaagtaatttgctagggtcccacagttaataagtagtaaagctatcctaaaacagtacctaacagaatcataggcaagaggtgctgatattaggtaagtttcttcagttgagcatctattgtccattttttattaaaagtaggccttggctgggcgtggtggctcatgcctgtaatcccagcactttgggaggccaaggcgggtggatcacaaggtctggagttcaagaccagcctggtcaacatggcgaaaccccatctctactaaaaatacaaaaattagccaggcgtggtggcaagcgcctataaccccagctacttgggaggctgagggagagaactgcttgaacctgggagatggaggttgcagtgagtcgatatcacaccgctgtactccagcctgggtgacagaaaaaaaaaaaaaaaaagtagactttgtccagatagcagtgtctgtagaccagtgctgatttatataatcatgtttgaccataagctaaggtttattctcttatctctgtgtcagccatctgataaaatctccttgttttgaaatattttcacctttcagaaattaatagattaatattatgttcctcttgccttttcctaagtctcttaagccaagccagacatcattttggagatttcctttataaggaacttacagttaacccttttatctttttatagtacatataatagtattaaattatctcaccagagcaaaatggaatttttattagctagatctttgtattatgatccacaaatatggggtgagcacctactttatgaaggctctgtgggggggttggggaaataaagaggtatccagaagctcctggtctatttagggaaaatgcatatatattagtcgggatattgattcagctgatttaacagagactaagtaatagtggcttaaacaagatagaagggttctttctcttgctgtctctcatctcagctgaagaattaagggagaagaattgcccttatgctcccaaggtcattaggggcccaactccttccatagttttgctccaccattccctactatgttgttctcctcagatagtggaatttggattatactcccacatgtacattcgaggccccgaaacgggggaagagaaaaagtgagtaagtggtttctttttaaggtatgacccagaagttgtacatttcacttctactcacaactgattggccagaacttagtcacctggccatgcttaagccaatctgtgaaacctagtctgtagggtagctgcgtgcgcagctctggattccattactaaaaggaagaaggggagattgaatactgggaaacaaataagtccctgattagccatatctgtaaatactgctgtcacctccaactaaataataaggtcttaaagggtagggctgcattttacactctcagtgccttcaaatgataagttcttaataaatatttcctgattgggtgatttggtgaatgcactttcatccaagagattttctggagagtttttattatactgccaaaaccaaacactattcaatcccagggtaaacactgcaggaaaaaaaatgtcacagggcaacatagtcataagtgggttctccccatgctcacacgcccttcattctaagctgggggaggctgctgtagtaacacagatgcaaaaaataaactttgactaaatggcttcatgttccagatgattggatgcctcgttaaagcacccaaagatgaagctactgctccggcaaagttgctgacctaattttgagaactaaaagacagagctaagtgtgttttcatggcatcccacattcctttcttaattcatcatgattcatgggaaccaggatctcaggctgcccctcccccaggtagcagttaagctggtggaattgttctctctagtccataaggacatggaaacggatcctgctggaggaagtcaatagagcagcagtaaagcatccctccccccgcccccacccgaatgtgaacatctgttcaaacttttcacagctcccaggaggaagtggatagaacacagggcttctaactataaagggaaaacttcacccatttgcactctactaacttgaaatttatgatttgacctgacctggctttggctttatctctatgatgcctttgaagaaaggccaaactgggtaaataaatataataaacaagagtataaggggtgctgttattatattcatgaaagcaaacctttgcatgacttaacttcattaactatttgaatgtaaattactactgcttatggcaagtgagatagattcaataacataggctatagccacacctcaacttgaaaacttatgtttaacttaaagctgagttgctgtatggacttgacagaaacagcctatgcgctgtggttctggaatttcacgaatgcacgctggcttttcttcatctatctgaattagcaagaggtttgctgcatttagttaagacagccagacgctctctgggaacctcagccacccctaatccagacgtcagtttgcatttactttaggatgaatggaggtcccttccccctcctgttgtcatctgtccttcccagaatattttgcagtatggcctgtggcaatccttttcttcttgcttgctctgagtggtggctgctcagtggagggcccccagctggctctggtttccagctgcttcagagcccactggcctggaggtaaagctgcagagtgataagcattgtaaaaataaagcccgttgctagccaggccagccaaacagcgtgggaggagtggaaaattcagtctatgtgttcttggcgtgacaaattgtcaatatctgaggtgttctgctggaggaaatgggaagagatgttctctaaccagacctaatctgtgtattatcagtcagtagcccttggagaatcatgtcaaaaccaggctcatgggactggagccataaccttgggtcagcttgtttattgcccaccatctttgacttgaccaaccccttggggtctggtgtggccttgggaaccgcagtgtctaaatgcaagcgccactgcccttaattgaactactaagggagagtaagtgctaggtattgtttaatcagggatcagcccagtctctccctctacctaagcctgccatgtgcccttactgatgatacatttttatctgatgccccgaatgacagatgttactactctcgtcaagttttgggagtagctgtacatttttatattttttgcacaaaggaagtgactgtagctcctggaaattcagtctggtcacctgaaactttggtaattttgtctggtcttctttgagggatgtatgtctagtaatgcagttccctgttccttggcccccaggactccttattgtgtggcagaattgaaataattgcaggaaagagaacattgctctcctagccctgacagcaggcaggtccctgggataccttcaagacccactttgaattcagatgacaagtccttccagaaaataatctgggatgttttcctcattttactgcatacaattttccccattggtgtatcaagatattaaaagcaatccctgtctctctctttcctcctcctcctcttccctgactctcttcttccttccctccttttccccctctccctctctcagtttctttgtcttcgaagacactgacaactttctggcatgtcgcctaggcttaggagagtgaatctttatcaaaatttcttctagccattggcttggaagtactatataaatcagcaagacactttgttataaaactttctcattatcaacattcactactgttccattttatgaatgcttctttgtcttccaaaaagcatttcggattaagcaatgctgttattgaaaatgtgggcggtttctgctggtgtgcttggctggttgaattatagatggttgtcacgaatatcacaatgccaggttcctataaatgagttaaaaatattgatgtatgaagtaagttggggatggcaagtggagattcagcatccttattatccaattgggccactggatttgtactttgtagtaaaagagctctaagatctacatgtgatgcaactctccaatttaagtaggttgggatctttcttattattggatgcacagattcaaattaaactacaaaaaaaaagtattttacacatcctgtgtcccagcactatgctagacactagagatgaacagatatataaacaccaggcctgctattgaggtgttcataatcctgtgagggaactctaatctgtagacagaactctcttgcaatgtaatgaataccatagacaggtccgagaggtatgagaggtgcatgcctagagtcaggacacatggggacagaagacatgtggtggatgtggtgagtaagagcacctggtctttgatgacagacatatagggttaaatcctggatctgccataattcatgggaggaacagattactgaatgaattaatacatagcttttattggtattgggattcaaggaaatactgcagtgttatataaagtgctcaagacagtatttgtcacccaggatcaatggtgatttgtcattggaaagtaagcacttgtttcaggctttatttggtgggaatccaggcaggatgagtaggaacagtggagactgggatgtcagcaggagacagcctatggagggggagagctggggcctgctaagaagggcctgcctttctgtggagttggagcaggagcgggtggagagagggtcaagtgctttaggcaaggcaggctggggccagattacaaagccatttgtagtattagactgaaggatcagacatgacattgaagacagtggggatttattggtattggtgagcaggaaagtggcataaagagatgtgagtttaaaaatcaggcagtatggtagttcacacttgtaattccagtgctttgggaggctgatgcaggaggaatgtttgaggccaggagtttgagaccagctgggcaacatggccagaccccatttctacaaaaaataaaaagttatctgggtgtgatagcacacaactgtagtcctagctacttgggaggtgggaggctctaaaaaaattgttaaaatagcctctctgatggttgggttaggaaatgagtacagtagtgcaaacaagaaattatgttcacatttacttcactatatttgttgaaggcctactgtgtcccaggcactttgctaggtataaatgaaggtagagtggaggcaaggttaattaatacagggatagagaaaggggaaacactataataaatttttaggtaaaattgatattaaaaaaaaaccctaccatctagaactggggtgatgaagaaggccaagtgaaaaattatttcacaaattcatgaaaaaaatgaaatatttttggaacattggaattcaaaatacttcattagacctgggaataaaaagaatgacagccatttttcttcttgctcttctctacctccttcttattcattggggaaagtcacagaaactagagatgactggccctctatgagtagttgtctctgcagccctcagaggtcaggacatgctctgttttaagttccggagagataaggacaatggagcgaacagttggaaagtaacacatagctttacctagtattctcatggcttgccatagcaccttgaatgttcagttacttttctttttaaaagagaaactagtacttgaccttagaaagttgttttctgttgaaatggaaatgttatgagaggttctagtgaataatggaaaatgtgaggttatttgatgagaggttgaggacaggatctgaaggccatggtgggtaaacagtaggagtgagcagcgatgtgtaaatattgacatggaactcaggaggaagcaagaggaagaaaaaaggattatggcatgaaatagtttttgcttattggaaaaatgttgttcctaaagaataataaatcttaaagaaaagacagagacataagagactaagaagggagccagtattgtctttgattgtgttcatccttccagaagttctcagccacacccatgttggaaaggtggtcatggtactgtggcattattcattgccaggtgaaaaagtcagtcaattccttatgtactgcatagtagagattctaataggataaatttaataattgcaaaacaagacatacaatgtatatcaagccatattcttaccagaaaaatctcatccagtcagattctcttgtcaggtgcatttgtaactggtgagaaccactcacaaacggcagtgcaggtaaagttgcatccctcttattttagttaattcttcggaaatccaatatacctcattagcaggcaaaccagtatctctgtcttgttctttttcctcctcttaattgtcctgaaatctccagggcttattccgtgcaaagatggcccttgacttccaaatgcatagcatagactgctgaggtctcattggtctaccctgcacttgcttttcactgccacacagtggcgctgttgaacacgggccaggtacagtctgatactcattgcctatccattgttgcagggaatcctagctggtcgtgctgaccattcaggccaagagaatgtgccagccaggagagtttacctatacagtgacatcttgggtctcaggacagccccagttgtgctgagtgaagtcctcttaatgatctgtcacctcatggaagctttctcccaaggtccttcaccaaaacagtgaaccagcttttctgttaaatcctcaaaataaaggaccttgaaacacttatctccatagacaatggagccactagcggtacatttatactcatcaatgaggccacttctgatctgattttctgacatttgtcttgatttaaaaaaaaaaaaggtgggggaagggagatggacaaaaacttaatctctggcaggtcccgtctgatgacagctcagcacacagtgtgtgtttaggaattgttctgcttcttattctccccacatcagtcatgattccagaacttgaagtggttcaaagtgagctcatagtagcatttaacctgttgagaatctcttgtcaccactatatgttttcactggtaaaagagtcatctgatttactgtgtgtccccacattcacaatgcatacatattcacacaggacatggaagccaaaagtaaatggttagtcacaaaaggtttgttttctcctattttgctgtttacaaaggagtgttatcttatgttggaaaggatttcagccaagaacagcagtgaggctgtaggagcaatgttacaatgtatttccctggctttttaaaacctattccctggtttctgcctgcaagccttaggatgtgagatgcgggctggaaaagctgctggagggtaaagcagtaatagaaaaaagaagatattttgagagacaggagaagatagggtgaatggtggaggaaagaggtaaggaagagtcatgagcatgaaaatgatctgtgtcccagcattgatcatgaaccctgatggctgttggatccatctttaggcaaagacagctgtgctgggcgtggttgacagagcatatctgaaacaggccaaattgaactcttgtttaccatgattaaggtgactatataattgattgtccaaacgggaatacttctgagagtaaaaaggaacattactaatactgaagttggggcagcggtatcaactgggactgttgagggcaaaccaggagttagagtcatttgtattttgaaggtagtttctttaaaaatcaagactttaactgtgaacagtgcattattctgattgctatgttagctacaaacaaaataagatggtgccacctcaaagaattgacagtctagttgcagagatgagactcacacacaaagaaattatcagtcaccatccaaggtggtgtctaaccaagtaccaaataagtgatagtatagtcataggatgtgctaggaagggcactggccttggagttagaagacctgtctggatcgctctttagcagagtgaccttgtgtaaggtacttaatctcttggaacatccatttattttttgactgattgattcatccatccattcattcatttattcattcattcattcattcaataaacatatggactggccctgtgccgagtgtatcttggtggtaaagaacacagcctttacagagagacacctgggttcaggttgtacctctgtcactacctggagaccttgaacttaaccctcctgagcttcaattccctcatctgttagatggtgataacacctgctatggtctgaatgtttgcatcccccaaactcatatgttgaaatcctaacccctaaggtgatggtattgggaggtgagacctttgagaagtgattatgtcatgaatgggattagtgcccttataaaagaggccccagagagaccactgccccttccaccacatgaggacacagcaagaagttgccctctatgaagcaggaaaccagccctcatatcagatatcaaatctgctgccaccttcatcttggacttcccagtctccagaactgtgaggaataaatttctgctgtttgtaagttccccagtttatgacatcttgttatagcagcaccaatagactaagacaatacccaacttgtagagctgttgtaagatattgtaaatgagagaataaagtcagattttgtataggaaacatccaacagtttccaacatacagaaaaagcccaagaaatgatagctaaatgatagctaaaattattattccagatactgtactggttgctggaaatgcaaaggaaagctagggagagggctctaccttgcaggtgaaagcagagagtggtacctgtcgacacaccccccagggctgttaggagggtccaatgaggacataaggtgaaagcacttcacaggctctgacatgctgtgcaaaggaaagacctcacggttcttaccagtggttggggcattgtctggatccttctcttttcctatttattaggatgctgtcaactgtaaataagagataacccaaaatatcttaaatcatatgttatctcacagaacaagaagtccagaggtagagtgcttccaggattggctaattctgtggtttaataatgccatcaggagtccataattccactctgctaatctcagttcttggttgactcacccacctcagagtgatacattggctgcatcagttccaggcatttcatcctcaccacaccacgcactagacgcagaaagagactatcccttccttgtgtcttaagatctaagaagcccttcttggaaccccacccctacccttgcagactgacttgtcctattggccaaaattggatcccaagtcccttcccaagccagtccatggtaagataaagttattgtaactgccttacgctaatcaatatctattctctggggactggggatcttttcatcttccctaaaaacatgacattgtagagggtgtaaaattcctgaacgaaatcaagtttttgttaacaggaaagtgaagagaaatggttgtgggtaaccaccagcagtgtcatatattgtctctacaggtccagttcctaattctaccttaaaaatacctcttaaattcacattggcctttgtccaggttctcaatatctcccatctacgctcttgattccttctctctcttcttatcccacccatctgatcttcccttcatccaccagtcagccctttatacaattcaagcccgattataccatttcttaactttaagattctcaagactcaattcggatgcaaccacctctttgaaggtgccctggatgttttatttatgtctcttttatagccctaataagagacagtcatgcatttgaattatttgtatattctctgtgcctcccgctatctttcctgttcaacatggtaccattggccacatgtggctactgagcacgtgaaattgagcattgaaattcaaattgggatggcttgtaagaataaaatacatgttgaatttcagagatttagaacaaaaaaagaggatcgtaaaatatttcattggtgacttttaaaattgttacatgttgaaattccattttggttaaataaagttttcttcttaattttcaatgtggtgactaaaatatttcaaattgcatacatcatttgacatttgtagctcacattatattgctgagcactagattgctagctcttgcagagcagggctgtaccttatttatccgttatttatcacaccagctttctttttctaccttatggtccgttagcattggaacctagtccaaacactttacttggtgaaaataaagcttaagaaaactcaatttggggatgaaagagcacaagataatttcatgttatttgaccaccactcctggatttctgatacataggttatcttttgtgtgttccaactcatctaagcttttaaaatttgccaggtttggaaatcactctttgttgtggttacttcaggccactaagttgttatggactaatccaagttgaaaaaagagagaaactagaatttaattattttggttaggtttgtttttctctgttagtttttaattcttccacttagatgttcctcaacaaattatattttacttttttaaggtagtggtgctgtctccatgactataacctctagaatattttagttatttttacagttattagaaataaagaagcagatgtaagttatgctttctattcaacttcactgaattatagctggaagttgcattttttatggatgaattatatatattttactgtttattgtattcttagcaaggatcatttagaagaccaagaaaatgaccatattatacaaaatatttaagagaaaacctgtttctaatggcataataaaatcggaaactttaaaatatatatttaatgagcagaagtaatggaattaagttttatatttacagtagccaaaacatgccattgtttgggggaaataatctttttctggaaatgcctgataaatttatacttctaacttggaaataaataatattcgtggtcataaaccatgtgctgaagaatacagcaggattatgtggttatcatctggtcaaagggcctggcagcctttgaaagctgagtcatggctgacccccacctttggggcaggctgtctcccgaataagcagaaatcactgtggagtccattatttttcagtaggactacttagtaagtgctctttgccaggtcttgtgaagatcattgtttcctttgtctttgatcttttctcagtcactgaggaaagttctgccccagtgacatgtggctgctgggaagccagggtagaattctgggccctcccctttcatggagatgttatccctggacagctgggcgattcatttccctccctcctttccttccttccttccatggtgaagtaaacataacaaaaaatttaccattttaactaattttaggcatacaattcagtggcattaagtatattcaaatgttgtataactgtcaccattacccatttccagaacttttttcattccatagagaaactatgtacctgtgaaacactaactctccagtcatctccttccccacgccccgacatcccagtccctggtaacctgtgttctactttccatttctaagaatttgcccattctaggtacctcatataagtagaatgatgcaatatttgtcctcctatgtctcgcttctttcatgtagcataatatcttcgaggttcacccatgttgtagcatgtgtcagagcttcattttttaaggctggatagtattccattgtatgtatctgccgcatttgtttatccattcatctgttgatgaacttttgggttgtttctacctttgagctatgtgtggtttgtaacagtgatataaaaggtgatgacactggtcatttctgcacttggatgtatttctgatggaaaagagaaatccagctgttatcatacctaaaaccttttaggcgatataccctaaaagcaagtgtgacttccttgctgaaaacgagagccactctgcagaaggcatgtcatcagaggtggagacctctttagagttctgatttcccagggccaagtgcaaacatctcccagagaaggcaggcctgctcatcacctggcagaagatgagggtaggggcttctcacttcccccggacattcctaggcaggagggacttcagagagtctgacagaaagctccaggccaagtgttgtctgtttgctttaaagggagaaaagggaatttttaaaaggagaatgaaagtgtccttgtctctagaactgaagcaacttggaggaatgagtggagtctttgtttaggtgagtgacacttctttttggcgtgcctgttgccattttattccatgtagtggttgagtcatgttgtagccagagacctggaaatatccaaatcctgctctgccagtcgcccttctctcctgggggtttctctgggggctacaaatatacagaccttgggaaatcaaagtaccttttatcaccagttggacaaccagggtgggcctctccggtgatcaagtcaagaggatggtttggactcaaggcccagatgcggcctcttccacccttttggttaaattccagtgtttccacctgatatggtttggctgtgtccccacccaaatctcttcttgaattgtagttcccataatccctacgtgtcatgggggggggacccggtgggaggtgatttaatcatgagggcagttactcttcattctgttctcgttacagtgagtgagttctcatgagatctgatggttttgtaaggggcttttaccccttttgctcagcacttctccttcctgccatcatgtgaagaagggcatgtttgcttccccttctaccatgattgtaagtttcctgaggcctccccagccatgctgaactgtgagtcaattaaacctctttcctttatagatgacccagtctcaagtatgtctttattagcagcatgagaacagacaagtacaccaccatccagctgctatgccagaagagacagcagccctgtactatgtggaagtaaaagggatgaggaagagggtgccggatttctgcatatcttgagagccagatgaaagagagagatagagggaatatatttgactttaacaacctgtagttctcacctctggcaaacagtggactggagggctcacccagtgatatcagtgcctcttgaaaagtgacctgaatagagggtagggggaagggcagtagtttcctccttcctctgtatatgcatagacaccaagctaagggttttatgaatgtttctttatacaaccttgtatatcatgtactcattattatccctattttgcaggtgagattactgaggctccaagagtatatatagctagcctgtcatatacttagtggaaaagcagggctctcacccagatctactgtacatcttggtctgtgattaattattctgtaatagtcttcttgtcagactgggttccagaggcccccagaactcttgccgcagtcagcccttttttaaatcctattcaaaaagtagaatgggaattctgtgagaggtcacttccaggattagtttttgcttctttggagaagcacttctgatcatggagactatccattctgcagagccatttatgaggcttaatttagaaacaattgaagtgattatagcaaaattgttttaaaagaaaaagacaaatggacttatttcaggctaatgtaattatgttaaggatttatttctaatccactgtggaaccctggttagaaataagtgttagaaagcaaagcattggcttcgggaagttttgttgaaggagtttttaaagcacacagaattaaactcatgaaactgacaagatgctgctgcacaattacatatggaaaacacacacacataccgcgcatgcacacatgctccagggtaagaagagcaaaagagaccacactcatattgcacagtgattatcctgtggcaccaacaaacctcacacaccccctggccttgagagagcctaacctggttctgttctccagatctgcttctctttatccccatagttttatgattgtatcagcacagagactgcataatgtactggtttagaacgagagttctgtggttatggccctgcattttaatgctgcctctaccacttgtttgctgtgtcatcttgcataactcacttaacctctctgtgcctcatccttcatctgtaaaataaggatgatggtaagaccatcttcagagtgttgttatgatgattaaatgagttagtgtgtgtaaagcactggttcatggggagtgcttttataggaatatgctcaatcacaaaaaaccacagtggccagccaagcccaccatgggcagggtgggaggcagatggagaaaggcctcatattcacgaaggaccacacttttgtcactttctccactaagtttttatgtcaactcagagttatactggtgagattgatgaacgagctgacaatcaagccacttaaacttgggtccctagaccacagcacctagggtgcactgtgaattaatattctttatgatcctacaatttgcttgtgaatattctaattgtagtgcattgaatttttacttgtgtcataaatctgctaaacgtaaatgcttagattaaatcaccatttttataaatctgtttttcctccctttttaataagccatggggacacaaaaaaagacaggtgaccaggcctcccttgaactctgggatcaaacctgagcctttgggatattttctgaaaggaaaatgtctcatttcattagaggaggaaggtctgagtccatggtggcaattcactcaaatcagagcttttctcattccattattagtgtataataatcacttttcccactgggtgcggtggttcatgcctgtaatcccagcactttgggaggccgaggcgggcagatcacctgatgtcaggagttcgagaccagcctggccaacatggtgaaaccccgtctctactaaaaatgcaaaaattagccaggtgttgtggcgggcacctgtaatcccagctactcaggaggctgaggcaggagaatcacttgaacccaggagggagaggttgcggtgagctgagatcgtgccattgcactccagcctgggcaacaagagtgaaactccatctcaaaaaaaaaaaaaaaatcacttttcctcaagctcagtgtaaaaagggaaccctggaaagtaggcttaaagaggagataatctgtagggaagtgcaactgtggttgtttccatggtgtcccagttgggatgcttccaggtacaagtctgaaaaactccaaccttggcttgccacagagaaaatttattctctatctcacactactgaaagttatgggaggaagcccaactggtggctcaatgatatcatcatgatttttctatctgtctttctcacagcctcaggggcacttcatcctaaggctttgcagtcacaagatgaccataacaattttagccatatcatcaaactgcgggaaaaggctgtttcgcttccttgtgttccatcttattagcaaggagactctttccccaaaggcttctagcagctgtcctttcctgattcattagccttcccctaaccaattcttggcaaaaagatgcaaccactatcattggcttagaccaaccagattttgcctgtgtcacagtgggaaggaggagaagacgccagaaggacatcaggactctgtgtgtgtggggcaggaaaagagctgctgggtgtgggtccaacagactgtgtgccacgggaactttccaaagcagaggtgtctaaactgggtttcatgttggaaccacttatactggatatcgtagagttggctgctttgagggcagtgttggtgatggcataattgagattgggccatatctcttactcagcacatatttgattggaacatctttgccctaacaccatgagaatgagaggaacaattccaggttgtaattccatcagggtagcatggcatcccagatatgacatctttttggtggaatttagtgaaagatccaagtgagaaatgaaccttagctaacgataaggtcatcattattactattcaaagatttatctatgtaaaatttacatttatccagttaaagacataaatgtaatatattattatataattataattaatataaaatttacgtttcagagatgcatggtgatgatcatttggggtactggttttggttgatgaaaaaacaaggaagctcattttgcaaacattgaaggaaaatattttgcttcacatttgaagacctgaatttcaaatctcaacacaggaatctgaatcaatatgagcagctatgaagctctgccttgaatgtgttcttgtgtttccatcctgaagaggctgaagtgaacatgaaattatggcactaacatatatatatatatgtatcataaccattgttgttgctattgctattagtatttgtattacactggataatttctgcaacacttgtacatgcagtacctcatttggtccataccttataaggtattattctgcccattttacagcagattaaatgacttgcccagggtcacctaactagtaagtgacagaacaggaactcaaatccagatattggaccttgatgtctatgttcattccttaccattatgaaacttaattgcatgttttagcatttccgaatttcatcttttcactggaggcctgaattctggctcaatgactttctctccccaagcctatattttttaatctgtaacatgcggtataatgataactagtgcatagaatgattgtggaggattaagtaagacactgggtatgaaagtgctttgtaaaactgtacactattacacaaatgtgtgttcattcccagctctctttctttaaatgagatatggtggtgcgtaatgatcgaagcagagacttggagtctggtgtgcctgtattcaaatctgactgcaccacttactgtctgccagatcttggataaattatttaatctccctaaacctcagtgtcctcatctgtgaagtgaggtgagtgatactctctcttacagttgttacagagattaaatgagataatgtgcaaaaaacatttagcatattgctaggcaggtgaccagtaatgaagtgagggtgaacattaggactggcacactaggaggcccttggatgagttagagacgtatcacattgcaggtgattgtggtgatgccaaatagcaggacagaacagacttagggaagcagggcccactcactgcattgtgacatcactttgtaattaagtcttttcccagaaaagaactgtcttaaccaagtcctgtctataaagttttctaattaactcgagtcactccacaatgcttggaaagaccaccgtgcaatattctttggctctagtacatctaattttgtcttcaaagaaaacctgacacagtatgagggaagctgggaaatgaaaagaaaatcttctgtggacagattttctccccctacatctcagtcattgcatttcaaagcccgtttccacataatgaaaactgctgctcaccagggcgtgatggctgggcactgaacatcacccgtctgggtttatgtgtattttaaacaataagagatgacaggctaaaatggtaaagtggctctattatctaagaaaaagcaattgagttattctgaatcaatggtggagcatgcataataggtttgttggattttcttttttctgcaattactacgttttttgagagttcataaaattttaatttttactgctttatcaaggacgttctcggtgaaatgaatagtcccccccaccctaccccccagaaatgcttgatgatgacatgaagatccaaagactaatgcttcaaagccactgctttgattcctacaaaggcaccagcagtctttcctcaccatacgattattaaattttattttggttatttaagtcaggatttctcatcccaggtgagctgtgaatgaggtgttattgatcccttggctttccaggcagcaggagtacccggcttcctggagccttcagcattctcatccacttaccagagtactgcatacatagtgtcattttctctgtgtgcctggaagtataaagggccaagcagcactgctgtaacagcctgccgattgtaatagcttcctgctcccatggcagggacacgtgcttagtagaaatttccataggtagtttgcctgactaagcttgatcttgacaatgaagatatatggtagataaactagaagtgaaactggatctctgcacagcctgaaactcagatcctaagacttttaaaacttgatagaaagaagataaaagataaaaactcattttaagatctgccagcactacgtgtcttgctagagatggagacttctccgttactttggaactgtttctttgactatgataatcacccaagtgaactttgaattatgcacatgtaaggatttggttctgtttgaaattggagatgtttaaaatgctctggtttcaagaagctaaaaatatatttgctttgggaagaggtggaggtcagggatagtctgctgggaagacagagctgggattcccatctaggttgatacaggtagactgtgcttccctgcctgcagtagatgagcaccaggggactgagggggctggactggagtctttggggaggatcatgaggaccctgaatgccaaagatggtaggagctgaggaagggagaaaggggctatcagaggtagcatgatggcccagggcctgagccttgatctgtcgatctgtctttggttcgttccaccaacaaattgcattctccttggaagacacttctccaagtcaaggctctgggctgtttacatctcagtgccttcttaacttctctcgggtttaaaggagttcacacgctgtccaaaccacctctgtgatttcccagccgagccttggcccgaagggatcctttcccacttactgtggttactcaagtgttgggggttactcagtcctttgctcccttagcaattaggagcagatttcagacaaaacttggtcacagctttgctgtgtgcctcatcctcaggacatttttataattcgattctgatatctgtcctcataaattcatgaagagattggtttattgtcatcctatttcttctggcatctgtgaataatgaaaacagcctcagaattgatagtgtcactcacagctcagtgttatttgaggtagtccagggaatgaaaggcagggaaagttcaagaggaaagtatcactttccctttgtactcacctgtcaacatccccctgtgcccataaaaccacctttacctttcttaataggttaggttaaaggcaaaacccaacaattctaattgctccttaacccaatctcatagtgaagagaactcctacctttgttgtagacttaaatgtttcatgtgtaacgtgttattgccttaactagattatgctatttgaatatagatatcacaacttttgtataaagcagtcctctatctgctctaccagctgaccagtctcccctgccattccatcccatatcatgctttggacctactgtaatatccaggaacacactgagttttcaggaaattcttgtgaaataactgaaagggagatggaatcttcctgagtaaagacactattccaagcatctctcatgtgctaaagtgcatagctcatggcctttattctaggaatgatattcattctaatttttcaatcctgctatttgatctactgggaataaatttaaatattttaaaatacactctttaatacatatgtaaatatatatttagaatccttgtaagccatgaaaaggaatgagatcatgtcctttgcagggacgtggatggagctggaagccatcatcctcagcaaactaacacaggaatagaaaaccaaacaccacatgttctaactcataggtgggagctgaacaatgagaacacagggacacaggggagggggaacaacacatattggggcctgtccaggggttggatggagggagagcatcaggacaaatagctaatgcatgcagggcttaatacctaggcaataggttgacaggcacagcagaccaccatggcacacatttacctatgtaacaaacctacctgcacgttctgtaccgtatcctggaacctaaacttaaaaaaaaatccttgtaatctaatgaggatcagtttatcaaactatatacataaatttttattttttgctacgaaacaaaaatggattcaactcagatttgatcactgttgtgttaattctagtattttactgtgcttctatgttcttttattatcacttctctatgaatacagtcaaattctatatttgcataattttcttataatggaaaaagctattcttaaagaaataagcaattgactcaggattagcatagtgctctgtatcattttatacattgttgcacatcataattcatgatgaatggaaagagaaaactagcaaatttatcttcacagttattcaaatggaatacttacatatagcatccttcctttattgctttcttcttcaataaaattatgtggatgaatttcctttttctttctttctttttttttttctttgagacagagtctcactcccaggctggagtgcagtggtgcaccacttcaggggttcaagcgattttcctgcctcagcctcccacatagctgggattacaggtgcccaccaccacgcccagctaatttttttttttttcagtagagacagagtttcgctatgttggccaggctggcctcaaactcctgacctcgtgatcctcccacctcagcctcccaaagtgctgggattacaggtgtgagccaccgcacccggccctttttttttttcttttctttttttttttttttttgagacaggctttcgctgtattgccaaggctggagtgcagtggtgccatcatggcttgctgcagccttgacctcctgggctaaagtgattctcacacctcagcttcctgagtagctgagaccacagatgcatgccaccatgcttggttaattttttttttttttttttttttttgtagagatgaggtctccctatgctgcttaggctggtctcgaacttctggactcaagtgatcctcctgcctcagcctcccaaaatgctgggaaaatgagccaccatacctagcccctcctttttttttttcctttcactgtaatcatttttgtttcaatcccatccataaagctgaatttgattataggagtaagcatgtttgaaactttagctgtatcttcaatgaggaaggcttaggttgtcagtcccagccatttattacatgactatatttgtgcttctgatgatatactgtatgtcatttgtataaatttaaggtgtttgctagctacacatgataaacgcatagctgtaaagtctcctcttcttagatcacctctatggagctgtgtttgctgacatcataactgctgagctatgtgtactaataagcttgtctgtgctgcaagattaaatagataaggccagaagtcacattattcaggaaaaagcagaatgtaattttctttgcaatttcttttaatggagttagcacatcttgcgattcagcagcatgtgtatttttaagtggtttactgtgtgtgtacacagggatacaggatgcagaattccgggtgcctcctctccttggcctggcctggctagcagggagtaggatctacctgaccttgcttcagctgtccctagcctgaatagtgatagtccaggaaaatactacaagctattttgaacaactttagaatatttggggaatacaatttttttacactgattctacagagttgtttgtttttacagtatttgctgtaattagactagaaaaaataaagatagttgaatagaagttaaattatcttattagcatttagaatgagcaggaaaaatcttaggtggttcctgctgggaagggggatggatgggggtgtgcagcatggtatgtgagtaaacccagccaggcacacacagacagctttagatagaaggtggtttgcctactggcacacagaacctgtcttatagagatgtggggaggctttgttggtttttttgtctgtctgtttgggtttttttaaaccactttgtggatatatgttcatctttcctctctttagattaagcttccattttcattttctcttaacaagacatggaaatagtaaccagatagtaaatagctaaacaggaaagcttttccttaagcacacaaatatacacacatcctttctgagcctctgctctgctttctaccatgagataccctgcagagtggaaggagtacagagatctgtgttctcctccaccttgggtacttattggctatacatataaaaccttgggtaagcccgtaattcttcaccctccactttgttaatattgggataattaatcttccttcttcctttctcatgatatttcaaggatctgctgaaatagtgtatgtgaaagtcctatggactcatgcaagaagggactggcctttatttcagtccatagcactgggcagctggtctagtgcctgcacacacttttagttcagcagatgttagtggtaacagtgagtgtttaaaagagaccctgtacatgattctaaaagcagtgtcctctgctaatttaactcttttataatctgtatggtgagattaggagtagagggaacaggggtcaaattagaattgagacaaaattgggttttaataatttcttcattcaggcaatagatttttattaagcaactgttacttgctaggccttgttctaggcactggggttatagcagtgaacaaaacagacccaaatcaatggcctcatgaagcctccattttagcagggtgtattagtcaggggtctctagagagacagaacgaataggatagatgcatatatgaaggggagtttattaggagaatcgactcacacaatcacaaggtgaagtcccacagtaggccatctgcaagctgaggaacagagaagccagtccaagccctaaaacctcaaaagtagggaagccgacagtgcacccttcagtctgtggctgaaggcctgagagaccctggcaaatcactggtgtaagtccaagagtccaaaagctgaacaacttggagtgtgatgttccagggcagtaagcatccagcaggggagaaagatggaagccggaagactcatcaagcctagtccttccaacttctgcctgctttattctagccatgctggcagttgattagatggtgcccacccagattgaggatgggtctgcctctcccagtccactgactcaaatgttaatctttagtaacaccattacaggcacacccagagatgacactttgcatccttcaatccaatcaagttgacactcaatattaaccatcacacagggaaagatagacactaaactaaataaaactgttagtatattagaattgcaagtgttaaggcaacccaaaatgtagagaaggaggatcaggtattatttttttaactgggggggtaagagaggacactactgagaaggggagactggggtagacctgaaggaggtaatgaggaggtaaggagccatgaggacatggtggggagaattggagccacagggacacgaggggaggcatccaaactatgaggacatagggggtgatattcaagccgtgaagatatgagaggatcctggatccatgagaatattggggatggagacattcaagccatgaggatatgggagtagggaggcatttgaggcacagagaacagcacgtgtaccctaaatggggggataatgccaggcaagtttgaggaaagagacaagtgaagctcaagtggagggaggtaacttgaaatagaaggacatagagtcagagagacaagaatgatgatgatgatgaagatgatgaaggtgattaagatactgttgagtgcttactttgccagtactgttgcattatctcacgtgatccacacaaaaaccccgatgcatcagttgaggaaactgatgcacagagaagtatgagttcctcagggtcacacagccacgaggtcttgaagccagcactggcattcagggtcctctgatgccaacagcctgtccttaaccattgtgccttatcatgtctcctgtgtaagcaagccaaccgcagatagcgttttttggcgttccgtgttctaggtgatattttctttttttcttcttcttcttcttttttttttttttttttttgtttttttgagatggagtttcgctcttgtcactcaggctggagtgcagtggcgcaatcttggctcactgcaacctctgcctcccaggttcaagcgattctcctgcctcaccttcccgagtaactgggattacaggcacctgccaccacgcccagctaatttttgtattttgagtggagatggggtttcgccatgttgggcaggctgatctcgaactcttgacctcaggtgatccacccaccttggcctcccaaagtgctgggattacaggcaggagccactgcgcccggctgggtgactttttcttattgtttgccagctttgtagtgagtatactatcaccaaaaaagtcccttgagactactctcagtttcctaggaaaaacaaaacataaggagaaaaccaataccggtaccattgctgataaactttggacctgtataaagaaagtctcagtttcccagatacagaaagaagactctctgaaaagatgaccacagacagtagctttggaaaggtacgatctttcattattaccaactgaatgattgccaggaatacttgccagctaccttgctattcacctaacaccaatatttttgaatagttcagctgccctctggttcatggaattcttaaaaatgacaaaagcaatgtaacagcatctacagtcaatacgaaatagatgcaatagaatggagccatcgtttcttgagcatttaccacatgccagcgcctttctcagtgctacagagggaagcacagcaaaactccataggtgcactcagtgctccctggggagaggaaagacaccgaatggaagtgaccatctccacctaaacaccaaggaagactccaaggagaaggagagagttggaattttaatgttaacttttgggaaacacatccatgtttacaaaatgttttgtttttattctcctccgagcttcctttatagggctggagaggcaataaaaacacttgtcaaggtcaagctagggtgaggagtttggtgactccaatcaggttggggtgcggccttgagaggccctgagtacgaggctatggggtttggcatttaatctgtcatcagtagggaaccgtggaagatttttgagaaaggacatgacttgaacaggtggggagccttaaagaggctgagcagttaatatttttgagttcagatgggagacagtgaagacagtgaaggcttggattaagaaatggtagcagtgacaggaaatgaagttgagagcagcatgggcaacatagaccctgtctctacacaaagtagaagaaaattatagtcaggtgtggtggtgcatgccagttgtcccagctactcaggaggtgacactggtgagccacgatggcgccactgcactccagcctgggtgacagagtgagaccctgtctaaaaaaaaaagaactgttgagagacaaggatttccttgtggctgtatttcttttccttatgacaaataaaggtggttttgtgttttttaaaaattagtttattcctctttctcacctctcttacattcttgtgaaaagctgattttaaacacagcaataaaacaactgagaatcatttcttcccctgggtaagaaagaattaatgcactcaatcagtcaatatgctgtatttgttacttctcagtggcatccaatttgttctgaaaatataattcttgtccagccagagcctgggaatgggtgacaagttgccctcaacagcactaagacctttccagagttggatggccatttgctgtggggcttctctgagtctgttcttattccgcccagaccccacttggtttggtctgtttagtgattgatgggccttgaaaaccccagaggttcttacctctttggagtctctttactccctgaactctgagccatagctaccatttccactcaccacggggtatcctattggctgggcctggaaagtggtgtttttgtcggacatggccaggtttaactctgtgcccttaagacaacactctgagcctccaggatgatgtggaaacaccagcaggtatagttagggcatctccacacctgctgtataaatagggaatatatatactttttagcagtgtaattggcatgcagtaggaacacaaataggaattctgttcctttcctgtccctgcagtgtggttgctgagacatgaataaactagggaaagactttgagaggtgttgtgaccactctttagacagaatggaccactatccaaaatttagttcagatatcaagattgatgatgctatacatacactaaagggatacgaacaggttttctacttacataatgggagcttctcagcagagcaggacaagcctaccaaactagtcccaagatggcttgagagaagaggaaaagagacagctcggggtttttattgccattagggggtacatacagaatgagggctcctgcataggaacgggggcttgcctggtttgagtctcccgctggtgtcgaggaaggagcaccttttcttatcagctagcccagatgtgtagggcacaaggaggaagaggaacgggtgatgtccaaaagctgtgagcagtcaagcatcaaaaaattgagtcaaactttttattacaagaggcctgatgtttgaacaggattggatggaagtgagaatcaacggtgactcagaaggaagaagaaggagcctcactcctcacctcagacataatattagcctccgctggccacagcgtagatcaatataatcctgatgcaaatggaatccttagactgtggaaatataaacacatggccttctttcagccatgaacacaaaggaatctgaaggaggggataatatactcagtgatgtggattactagagttagcaaataaaaatgcgggatgttcagttaaattttaacttcagataaaccacagattttttgtgtaagtatgcccatcaacatttgggacatacttaaaaaagtattcattgtttatctgaagttcaaatttaactggatatcctgcatttttatatgacaactttaatgagcccttaaaagccctgcagacctgagaggggaggctggggaagagaagaggatggtggaacatttgtcttttggtagcaccttcctgccaccatctcaggacacacccatctttgtcccgaggatgctgttgggtgctgctttttctacgggcttggtaaagtggtaggagcaaagcttcctttaatacagattcttatacagctggcaaggttagccagaggactggttgcttataactttccatgctcttttctctcttgtcagtttaatagatcggctccctgtgctggtaatcacagacataactaattggttttgtttattacctgatttatgttttcctcagtctttgttacttcctatcctcccttcaatctatcattttatcctgctttccaccccaacatccatcctcccatctaccttttctcccttccttgcttccttccttttgttttccttcctcttgttcttcttcccttccttcaatggctttttggggcacctcctaatttctaatctgcaacagttgttctacgtcctcttttatccaaaatcagtattttcttgctgctttggacccattcagagcaaactcacaatgcagataatctaatcaatgcagattctgcttaaggaacatcatggtaatgacacagatttctttactgagattcagaatggagttagaaaacactgtgggttgttgttgttgttgccttatttattagcctggtaattgaagaaatgtggtgtggtttttaccacaaagcattgattcctgcagcaggagttccttgaatgaatggcctgggtcatttagggaatatatcccttgcaactagagctgtgtccaacaaggaagaggtgcctgcatttatccagaagagcaaaaagcctgaaggtgggatgctggcgccacagcaaaataaaatgctcgtcaatggcaacaaattgtcaatttgtcaatgacaataaatgcttattaagcatctgtcaggaatggcgttaggtgccagggatacaatatgaaacaagacagaatccccctacagtggagtttagcatctggcaggagatgtagattttaagcatataactgtgcaaataattccaattgtagtaaatgcttttcctaagcacaagatgtgattggagcaagtcatgttccgggtggtcagagaaggcctccccaaggagggcatgttcagtgagatctgcagggtgagtgtgtaggaattagggcaatgagaacgtttagaaaatgggagaggttgagttggaaaggagggcgtttcaggtcctgagaatggctgccgagtgaagaacagatctgatggagcagaggcagaggtcacaagaccaactagaggcagtgatccaagcaactcctccctgctcctggggcactgctaacataagagagccctggggctcctcctggagaaggccatcaacacagccaagcatcacacggttgctgtgactgatgagtgacactcaagcggggctcgtgggatctgtatacagagccacagcctcctcagccccaggaaaaaagacaacaaaacaaaacaaaaagcagccttcagctcaccttcaactgcttctctaatgggtctttgcttaatttcaggttagaataaggatttccatgcaggaaaaccctcagtgggggtctggcagtccactctgggtgcacatccacagatgtctttcacccctggctagcaatctgaggaggggagtcgggctggaagccaacagtggttctctcgttctttcttgcatctatcactttcatgctctttttctttctagttctctgtggaagtaaaacaatggggagaatgtccccaactctggagggctcatcgttgtaaacaacccaaccaaactgaacctttatctcattcagatgaatagtccatgtttagcgagcacctgctagatgccggccatgatgctgaccttttccctattcattgggaaaaatgaattttcccccctttctcacttggtcctccaaaacagccctatggaaagggtgctattgtgcctattttactgcagagcaaatgagaccaagagatgttcaaggacttgcccaaggtcacataacacagcaccatatttagaacttcagtggagttgttctgctaccaagtccaattctctttctacacaccttgctggggggagcaaaagatgcaagaggttaagaaattattgcatattctctttctgttcaccaattaatgggattctcacttgtacatatgtttgatgaataaacgttaatattttcgtaagtttgatagacaaacattaatacttttagccatgttggccaggatagtaccttccaacagaagcagccactgaaaccctgaaagtgatccagccagagacatggaaggggtgagggtgaagaggatggttctggttctacacccctgggaccgtgagttgcatgaatttatcatggcagttagcttctctacaccccttatccttggagaaaaaccaagatatagcatatctcacatcaattctacagtgaaatcatgaggataaaatattattgaaaatgctccagactgggcatggtggctcatggctgtaatcccagcactttgagaggctggagcaggcagatcacttgaggccaggagtttgagaccaacctggtcaacatgccaaaaacccgtctctactgaaaatacaaaaattagccgggtgtggcggcgtatgcctgaagtctcagctactccagaggctgagccacaagaattgcttgaacctgggaggcagaggttgcagtgagctgagatcgtgccactgcactccagtctgggagacagagcaagaccctgtctcaaaaaaaaaaaaaaaaaaaaaaaaaaaaaaagcaaagaaaaagaaatactctgaattgcaaccagaatctcagattcctgttatttccctgtcctatgtaggatactatttttacaaaaagattctttctaaaccaggaagctgtagatgttaaacacatgtgtgccaaataaataaaaaaattatgaactattcttagagtctatggagggtcttgagtcaatttaccgaatgaatttgtggcctctagaggatatctaaaaatggggacttgagctcctcctatacctcctctgctaagttaagtgatgagccctggatcaccatgatggatttatttgcctccccagtccatgagggccgactgttttgttttatggttttatcagaacccaaagtagtaataatgagttttaagtaagataatatttagtaccctagttaagcggacatttattgcaaaaggaattcctcagaagtttcccagagtaaggttttaacctatggcagccttgaggggctgttgaggccccagagcaccctcctcttccctggatgcagcctgctctggtccagcatctggctcccaaggcagccaaaacaggcagctctgttgcaatggtctgacggccaggtggtctgatggtgaagagacatgtggacttcatctgaagcctttgacttcagacactcccacagtttctttgtttgggacagccttggagtttctgtaggcctggaatgtgaccatttagtaaggcctctgtccactttctcatgggccctttaagcatgcagtgaaagtacccctccaattgctggcaacctgggagggagtggaggcagacttagacattagatggacttggagtagctgggaaaggagatgccatcaggagttgaatttcaagcaatagaagatgtagggtgctgttgaggtaaaatatgtctttaggttgaaacaggagagagcgtatttacatggttacaacagtgcactcttttaagagcagggtgggtgtgccctcctaagctctcgaatagcaaatgccaaactcacatgtctgtcactataactcaggcagaccatggggggcggggagtgaggcgtggaattccaactccatttccaatttaattctcatcttagggggtatgtaagcttgcaagatgtgtagttgggttataacggctttagaggaaactggcttattggagaatttactgcaaagaggttcttcatgtcattggaaagaataagttcttgccaatataaatcagctctatctgctaaaaaccctgcactggctcagcctcagtccagagtgaaagctgaaagtccctatagtcatgtccaggccccacatcacctggccccgcatgatggtgctgacgtcatctccttcataccctcataccctccactctagccacatcctggatcacgctaggcacgcctccagtttagagccctctcgttcactgttttcactcctgaaagagtcttctcacacttacctccatggtgccctgcctcacttcctctggtctttttccaatgttgctttctcagtggggtcttccctggcttctgattcaaaactccgacacccgttcactgactgctggtattctgcaactcccttctcttctttactcttctccgtggcacatcttcatctaccatttcaattatttattttgtttattgtatgtctattgccactacaccataagcaccattaaaacaggtgcttacagtctagtggcaatagatgtacaagaataagttcttgccaatgacatgaagaacctctttgcaataaattctacctaagggatacgggaaccatgaccaagtgaataaaagaaaagtggagtcaacctaaatgtctatcaaggggaattagttaactaaattccacataatggaatagcaaagggctgtaagcctcacattatgaaccattgtgtctgttacctaattcgatgcttagcacaagggcagtgctcaattgattatttgttgaatccatcgataaatgaaaatttagcaatttgaaagggtaaatgagctacatctatatgtataacatggaggaatttccacagtattctttttttttttttttttttttttttgagatggagtctcgctctgttgcccaggctggagtgcagtggcacgatcttggatcaccacaacctccacctcccagattcaagtgattctcctgcctcagcctcccgagtagctgggactacaggcttgcaccaccacccctggctaatttttgtatttttagtagagacggggtttcaccatgttggccaggctggtctcgaactcctgaccttgtgatctgcccgcctcggcctcccaaagtgctgagattagaggcatgagccaccggacccagccaatattcttttaagtgaaaatgaaggttaaagaataatatagaatgatcctgtttatagttagagtatatgggtttcatacatatgcatttaaatgtctaaggggatacgtatgatttaaactgttaatagtgtctttttatggagtgctatcggatcggaatgaagatattcactttctcatttttacatccctttattacttagattttttcaataatgatgtaatactttggtaatccgcaaaacaaaaaatggtatttccatatttggaggagggggaaagtgttgctgttagacgaggttctgctcagattcttatcagaagtatgttttattggcagtaatgtggttgcactttatgaaaaataaaacttggaaaaacccccaggccaggcccctttcagcctgaaatgcacactctagtagagcaaggtctctgatattttggagactataacctctgctcacctggagaagacaagatgatttcctgggctttatctcatgctgtagggaatgcaaaagaagagtacatttgtttctagtgagcctcttgctcaccagatttttttgtaccatttcagttctcatctcaaacccagtcacgtctctgcaggggttatgagaacaaggtgtgtggctgggaaccccaggccatgacccttcacataggagatatgagctcacatgcccagcctcgctgggaagaggcctcactgggggcaatggctttgtaacatatttcgggcaattccagcaaagccattttgtgatccaaatagggcataggtctcatttccttacactggctcatcttagcagaggcgagaggagagaatattctttggtcaagataaagactaagttagtgagattattatataactctttaattctccctcttttaattttttcctgatgtactactctgttttatttcctaatttgcctgttatatataaatatgaagtttgtatgtatagtcttctttcaaattcccactggttccattgaagaaaaattctgaagcaatgtgctcttcgggtttttatttagtcttccttatttttccttagtgaaaatcaaagacaattgacctagaaatgaatttgtgggattttagtcaccagtaaaatttaggcagctaaaatatctgatgtctaagtcatggtaaatgaacacatactcctcttcatccacaactttgatagttctcttccttatattttaagaacattttttaagttgtgtctccacaatctagacattccattggctgaaaattcaaagcaactgttagtggacaagattacatgccccaaattaggcaaactttttttgcgtgctttttgtttgtttgtttgttttgttttgttttgagatggagtctcgctctgttgcccagactggagtgcagtggtgcaattttgactcactgcaacctccaactccctggttcacgtgattctcctgcctcagactcccaaggagctgggactacaggcaggtgccactatgcctggctaattttttgtatttttagtagagatggggtttcaccgtgttagccaggatggtctcgatcttctgacctcgtgatctgcccacctcggcctcccaaagtgctgggattacaggcatgagctacgccccgccctaggcaaacattttaatgaaactggtctctttcaggaatccctgtggttactgggttccttgttgcagccaagcttgtctttagctgctcgattcttgcaaattccattttaggagactttggtgcagtttgcattgaggcttttcctctgaagttaatcaggctgtccaggatgagttgtgtcctttgccctggaaaatctaactctgggctctgaggaattaagtcatggagctttcagaaccttatgaggaatcgcagaaatgcaaggctgcaaatctttccctccacgaatacacaaagtaaagaagggaacgtgctcatcctgaaagcctgttcactagccaccatttcctcttgctgtggcgtcatttttagttgtcattccttgatttttcttttttagtggaaacttaagttcttattttagattcctgatagtagttccttgttggtgatttggtgtcttctctttggatatattttacctttttcatctgcagtcaatatcaactccagatttattttttgatctctaggagactgggtgtgacccaaaataagttgagagatttcacattccccttcccagtgtaaactactgaataacaggatgccagtgtctaatagaaaagggtgcgcagtcacataaggaaatgcaggatcaaagcaaaggcccttaagaggtaaaagatgggacatccaggaggccaaggtgcctggagcagagagagaactgagaggtaagtcagagatggcccagggccagctcacgcagagccttgtgagccaaagagggaattctaactttattctaagtgcatgagaagacttcatagaactttaagcaaaggattgacatagtctgataagtgtttttaagaagatacttttatgctgggcatggtaatgtgcatctgtagtcgcagctacacaggaggctgaggcaggagaattccttgatccagaaattgaggttgtagcatgctagtgcaccacaatcttgcctgtgaataggtactgcactccagcttgggtgacattgcgagaccctgtctctaaaaaatgaaaatattttataaaaggttactcattactcttggaggctgagtagagaatagattggggcaaggagtagggagtgggaagatgagtgaaaagtaagatttcagtgaggagagttgttgtagaagatcaggtaggagataatagtttgtattgaggtgctgacaatggaaacggcaagaagtgaatggatttaagacaaattttggatgcagatccaacagcttgctgatggaacaaaaatggaagaaatctcagatgagcctcagtgctttagagagagcagttgggtggaagatggtattcttcactgagatgaggaaagttggggttgaagagagcacaagattcagagaaaataccaagagctccaattcttacttgtttcgttatattgagacctttcaatgtccagtcttgaactgggcatgaaggacacaacactgaagagggcatggttttagcttccttgtgtttgtctgcctacttcgctggtcattcctttttgttctcctttactggctccttctcatctcccagagcctaaatgccatgtgatcaaaggctcagtccttgatctacattgacttctttggtgctgtcatctggtgtttgcgtagaaacagtatacacattcacttccttggtgcttttctatccacattcacgtccctggtgcactcattcagtccttggctgtaaactctatctatatactgatgactaccaaatttatatcgcctcactgaacctcttcctctacctatagacttatatattcaactgcctgcttgacatctccaactgatgtgtaataggcatctcagggttaacacgtatacaactaaataatgatattcatgcctcatccaaaagccctgcttctcttgcattttccccatttctataaatgttaactttatccttatagtttcttaggcccaaaccttggagctatgctgcactgttctcttttttcacatcttacatatgaaccatcaaccaagcctgttggctctaccttcaagcagtacctggaatacaaccaggtgccccttttctgctgataccaccctggttcccaccaccatcacctcttgcctggatcattgcatggacatcatacctggtcttcctggctctgcccttttcctctttagcttactctcaacacagcagccagagtggtcctgttaggatataaatcagctttatcacatttctgataaaaaccctacactggctcagcttcagtcagagggaaagcagaaagtccctacagtcacctccaggttccacatcacctggtccctcatgatggtgctgatgtcatctcctcccccacctcatgccctccactccagccacatcctggatcttgctaggcttgcctcccagcttagacccctctcattcactgttcttgctcttcaaagagtcttcttacagttatctccatggcgacctgcctcacttcctctggtcttttcccagtgttgctttctcagtggggctttccctggcttcttattcaaaattccaacacccgttcacccactgcaggcattccacaactcccttctcttctttactcttctccatggcacgtcttcatctatcatttcacttacttattttatgtattgtgtgtctattgccactagactataagtgccacggagatgggagagctcccttgacccctctgtgggacttgcaacaggggtgtggcttgcttacttggacgccatgctcaaaccccttgtgagatggggagcatgcaggcaagaaggtgtggggccgaagtgagcctttttgggctccagccccacagcagtgtctagtggtgtgttacaattaatgctcttttagcagttgctgtctgcggatggctaagtgttaaccagctcagtggagagtcagggtgacagccttttacaccctgccctcttggtacccgggttcttgtttggcatccaggaagaatcaggtcacatgaacagtttgaaaggtgataaatgtggaggattttattaagcagtagaagcagctctcaccagaagggaagctggaaaggggatggtgcaggaagaaggtgatctttcctcggagcccaccatctctggccaggcttctctctgaagtcatgctgtctgaagttaagccatgtctatccacagtctgtgatgctcagttgcttcttctcccttgatgttcagccgcttgtctctctgccagctgagatctggggtttatataggcacaggatgggcagcagtgcaggccaaaaatgtaacatttgggtgggaaaacagggataactgttcttatttagggtcatggtttccaggcttgagggtggggcctttgccagggaaccaccctcttctacccagtatttccctgcctcctgtccacatcaccatgaaaacaggggctttgcctgtttgctccctgctgaattccgcagtgcctaggagtgcctcacccccagtagacacttagtgcctgtttgtggaataaatgagttccaaaaggaggttgtctccttcttcttcactacttctttctgactttttatggattgttgtcttaatctctataaatgctttgtccttggggctagtagagcatagggctaaaaccactgggcaaccaagcagcagcccacactcacagttaggctctctcattcacaagcagtgtcacctggaataagtcacctagcctctctgagttttcatttatttgcttatgagatagagaaagcctgcctgcctatcacacaggttgtgaaagtttaataggatgtcacatgaaagatcatctaggataaggcatcattttcatttatggcagcgtctggccctgactgaatgccagagctttacatgtttgactgtctcatttaactctcacatggaatcaataagagatgaactcatatcattaaactcattttacagatgagaaaactgaggagaaccaaaatgttaagtgaattacccaccagctagtaaacaatagagccaggctttgaagccaagcatttttattctagtgtttttccagtgttcatccaacaggacatccaggaggccaacgtgtcatagttcccaacagattatattctgagttatctacaaacttttttgagtcacttgaagatttgtctttacactctgattatagtttccaccagcctatgcagactgccaagtaggtctcattttttcctcttagaaatggtaaaatatcatatagtcacttataagaaaaactgtgattagaaaaaattttagcattatccactttatggtcattcaagaatgttaagtgtgagcagagaacaacagttccacaacttgattagttggtagtttaacatggatgtctgaaagtcacatatacgtaatttcttaggattcttaaattagtaaatctagtttactgaagcagtattagcattactattttagattgcaaaaatgccttaattgtgtagaattggcttatagagtgttacttaagaaaaatgtgattctacctctatttctgttgtagcacacttaacaacaaacaaacatgaaaagatatattagctttcatagaaacatttttgttctgtaaataggttaatgatatggtaaggcccctaagataactgaattaacattgtttatattaatgttactgctgtttataagatagtatgaatttgtgggcttatctgaattgtaggccattcccgtgattaaaaataaagacaaaactttgagttactgtttgcgaaaaccttattgtgctatgtagaaatattgaactaatattaaaatatttgatgctttggtttcagggattggtttaaaattggagtcctttttttattggttagtcttacaaaagtgtaagccattatatttttgactatttaaataaaaacaaatgttattttaaatatacagaatggattgatagtataggagagtgtaagttcttcataggaactttagaaaagaaatatatgctaattcagtttttttaatcttctgcacagtatatatacacttggtaattttgaactcaattttgtgttttgaaaatatgtgttcataatttaggtaatttgctacttaaagcaataagtctctgatacctgaaaagtaaatgtaaatggcgacggtgaaataatactgcaattaacttaatagagaaaaaattattaaaagacagcctgtcatacctatgttcaactagcacaaaataaatgttttaatgactgactggagttatgaaaacgatttgacccaaggtgcaatttttgtctccaaactgtttttctcttaactgccaattactgtagcatttccctaatgttatcctgccccatcccttcgactcaaacgggcagaaattcctgtcttcccaaagaaaaaggtattgtcaggcttccctctgtcttcctcctcaccacctaaggaatgaaactctgtcaaatgtcccctaagatttgtgttgtaccatctaaccaagtccagatggtgtctcaagtttagtcctcatacttagtaaagtgtttgtagatgaattctaggcttaattgtgaacactcgttttcccaataacttattccatgcttttctgacttgtttgtgttatggcctttctgtgctgatgaatttgtaaatgtggtttaattactgtttaccaaaaaatagctgcacacagatcagtctcagtgggagacttagctaaaatgttgaggcaatttgtttctagtgcaaaagcagctaataaatttgaagcactttttaaacactgggaaaggcacttaagtttggttgtgaagaaacagtgctttatacattggagacataaatcattctttaagagagtagatttaaatatcagaatggcatttttccccaaggccaggcaagcagcaatttgcacaaactgtaaaaatggtgatttgattgaaaaccacaccaaagagatatattctaaagaactccccaaaaggaaaacttgaaattacttgtaaattccataaaatgtctcagagctctagaaagccgggtattatgtattaccggatgtttctgaattctggcctcaggcaaattgccaacttagcaactaaatgacagctttacaattctaatacaaaccagcctctgtaactctgtttttttaatctccaggggaaaaaaaggacacagagggaagtgaaagatattagactgttcaatttataaattccatttgttctccatttgagttgcagttgaattttgcttttgcataaaatggtgtttgcttgattctgcctaaagagggaactctgggccaagcgtggtggctcatgcctgcaatcccagcaatttggaagacggcatgagcccaggagtctgagaccaggctaggcaacaaagtgagacccccatctctacaaaaaataaaaaatttagccaggcatggtggtacacacctgtaataccagctatttgggaggctgaggcaggaggattgcttaaactcaagagtttgaggctgcagtgggccatgattgcaccagcacattgcagcctgagtgacagagtcttaaaaaaaaaaaaaaaggcagggggaacccaaaaagtaagttccttcctacagcagttggccatactcataggtgaagtgccccatactcccatcactttggacacctgcatatgagcagggcaggttttgcctccagtgcagaagtcagaaaacaaaatcaataaacttggcaatgaatgaggattgctggtcattatctgaaccatgagtattatgcaagcagtttgagtagcgtgagatacaaacaccaccccgtagaagtttatttttagtgaggccaccagacaggcctcactaaattcaatataagagatcctaagctcaagtcttaaccaccagatagttttcagtgtgtaaaatagcgttctgaaaaccaagcccccgtgcttctggcagtgagcctccttttccaaaattattccatgtttccactttgtagttaccttcctatcagtcatttttctcagtcatgccttcattcattcattcaccaaatgccatttgcggtgggctctaggaagacgaagcaaccccagtggagactctgcctcaagggcctgactgtgtagcaggagggagacagaaacaaaccccagaatgcgtgaaatcgcaaagaagattggcaatcattaaaatggggatatgctgtctttcaggtattctgtaatttttctaagctttgctttcaggttttttttttccaatagacgaaaaatgcaaaatacaagtgcagaacttttttttgagatggggtttatcttgaccacacttcaatcatataccttgggaattaggaactaatctcgtatatcacctcctccaagaaagcttccctgagagcacccatgccccctttgggttgggcatttttccaggtactttcaccaaatccactctctattctgtagcatatctgtcatatcgtcccctcactgttaccaccatcccctgcacacacagctaggtgcccttagggaaaaggggccacatcttattctgcatccacagaaccagaaacacactggtaattgagagccaaatgttgaggcagtttgtctctagtgcaaaagcactataaatgagaagcactttttatacattgagaaaataacttcagtttggttttgaagaaatggtgctttctatactcaggaaaataaatcattctttaagggagtagctttaaatataaaagtggcattttcccccaaggccaataataattacaggtatttccccacctagtaaaagttacctttattttccacaccatgttaagtttaaaaataggtaacaaaaaggtgtgcattcttgttatggaaacatatattaacagcatatttaagtacacatacgaaaagtctggaagaacacatatcaacatgctagcaattgttatctctcagggttagtatttgaagtgatactgctttttttccctatgtatcactcttttactatgttactataactatgtgctactgccatgataagaaaatgcaaagttatttgtattttaaagagaaacatttgacctattttataagccaaaatcatgacataactttatgaagcatcatctttactatcaaaacccaacattgtcagtgatttattccatgcgtttaaatccctgaactagcatgttggagtttggtggtattaggtttgcttccattttctgtctttatgtctgtgtttataatattcagaaggtatccaagcagcattttacttggaaatattctagcaataaaacctgctaaattctttcccttggtctctctcttcctcctttcctttaattttccctgctaatacttggattagctatcagaaccccagccttcttaaatttaagctcaacctctggcaaattgatgtcaaaattaactaagcaattaattctccctctctccctgccctcatttccctctacctcacgctctctctgaaccttttgctttcaggatggctctgtataaaagaagtattcattttctggtcagtgataattctgctgtgcatcctctactggcctatctttctattattttgtttggctgaccagtgtgttgcaaaacctagacagtgttactggactcgtatagagtttatttgtttgttttttcttcttcccaaaggaacaattacaaattataaaatgcagccctaaagagcagctctacaaattatatatgttttcttttctatctgcagctgaattcttgccgccaggatggggaaacagaacagcaagctgcgcccggaggtcatgcaggacttgctggaaagcacagactttacagagcatgagatccaggaatggtataaaggcttcttgagagactgccccagtggacatttgtcaatggaagagtttaagaaaatatatgggaactttttcccttatggggatgcttccaaatttgcagagcatgtcttccgcaccttcgatgcaaatggagatgggacaatagactttagagaattcatcatcgccttgagtgtaacttcgagggggaagctggagcagaagctgaaatgggccttcagcatgtacgacctggacggaaatggctatatcagcaaggcagagatgctagagatcgtgcaggtacgtagactgagccctttaaaaaaagaagggcatgtatctcaagtaagaattggaaggtgcacagtatagcacggtgcagaggttgcaaactggtgagtcaccaggacacttcatttggcccaccctgcatgtttgaacagtttaaactgcattacagtgtggggagactgcacataaaaatccacactggtcggcatctcttgaaaaactagactagtgggactcccgggtcataggtgcatttaaaaatgttctgattggcaattggttgtaagagttacgatcaataaaaaggaatgtctagattatgattagtggttgtggagaccaaggttttaccatacagatgaagactcttaagtagcaggcttcagagaaaatagcttggaaatgtttcttatcagatgtaaaatctgtgttgctgttaatgctggtgggcttttcctgaattccaagaggaaggagggtataatgaggcatctccaacaccccttccatcatggcctgagcatgtttttcagattaactttagaatgcccttggctgagaggagtggttcattcagatgattgggggagccttagaattttattttttggtttacagcaccatgttagctcctgctcaacacttttgcccagtcgtcctggctgctgttggtcaatggttttgtgatcagtactgatgaagatgcagacgctgaggcagggaggaacatttagtcttcgtgggctgatgaaatcaacactccctgctaagaactcagccctgaacaaatagtatagggtggaaaatggacactgtcccttttctgtggaatccagtttgtgaaagagacagagagaattgcagagaatatgcagaaggtatgaattgacccccacccagcccctgttgacttcactccaccacatttgctaaggaatgtaaaaagtgatcattaaaaggaaggtgctttggggcaatgtcctttggaaaaataaataaataaatgaaatgaaatgaaataaataaaaggaaggtgcctcagcctcccagaggcattttcttcactgtaaagcacctcagtccattcacaggcccacagtgtttccaggctataattgtaaggacacccattccttacaaaatgctcagacactcatggctcttaagaagactgcaaaggaaagcttgaatttcttaaactgtttcctagagtgctaagtcctgatgattaatattcatgatcacagaaaggaaatattgtagcatcccgaggtgacttccaaatcatcaaagagattaaattaaacttagaaccattttcatattaagggctatgttattctattctgctactttgcaaactgacaattcatgtattctgccacattcttatgctaatctccctgctttcaattattctggataaactggaatttactgtaggatctcacagagcttcccattctattttttgttgttgttgttttttccctccctttttgaaaacccacactcctcaagccttgtcactgccgcaggaagctttgtgcctttgtctggccgtcttttctttgttgtagctggtctgcagcactcaggaaaatgctcctttgcttcagagcagtcactgtcaagtttctgttttgtgcctttctaaatatctcttagaaagtgatgagttgggggcaagctgtggaccaggagaaccgtcaacaaattaaagttctatttgttaatatgagtaacacctgtaacttgataacaagtgttgatacataaattcttagctgaatcccgtccctccacgactcagaaattcaagcaatttaatgaaaaatacaaatttatgattgtttacctacaaacaccagtaactggtcagggtgaagactggggtgaaaacaagtttataattaattaagcttgacaatgaatggggtataggactccaagtcataaattttctagttgctcttccctgacatcgcttcctgtggtttagctttagtatccacagaatattgtttgtagtgacaagctgaaattgttttgtatttcataacattggtaggaaaaaactctaaaatttatgggactactgtggattctgtgtagctctgaatcataccaaattagttcccctctggtggctataacaatgtttcagaaagccagtagcttaaaaatacaatttattatcctattgttcttgaggtcagaagtctgaaatcagtttcattgggctaaaattaaggtttcctcaggggtgtgttccttctggaggctgttggggagaatcctttcccctgcctttccccgattctagaagcttcccgagttccttggccgatggccctcttcatccatcttcaaaggcagcaacagcagattgagtccttctcaggctgccatcctctgtgtattttactctgcttttctcttccacttaaaaagatcctgtgattacactgggaccatgtgaataatttaggggaatttttccttccatctcaatattcttaatgtaatcacgtctgcaaagtttgtcttcctgtgcaagttaacgtattcacaggtttcagggacttggatgtggacatctttgggggccgtcgttcagtctaccacatatgccaaaatgcagttgcgttcctttttaaagaaaatatttttgtgctggatcaacatctgggtgaataagcaaaaccatatgcagatttatttttaggacctcaaatgaacatttttacattcatgtgtttatttttttataattttttcttttttaaaaaattatacttgaagttctgaaatacatgtgcagaatgtgcaggtttgttacataggtatacatgtgccatggtgttttgctgcacccatcaacccgtcatttacattaggtatttctcctaatgctatccctccccttgcccaccaccccccaacaggccccggtgtgtgttgcttccctccctgtgcccatatattctcattgttcaactcccacctatgagtgagaacatgcgctgtttggttttctgttcctgtgttagtttgctgagaatgatggtatccagcttcatccatgtcccagcaaaggacatgaatttattctttttttgtggctacatagtattctatggtgtatatgtgctacattttctttatccagtctaacattggtgggcatttgggttggttccaagtctttgctattgtgaatattgctgcaataaacatatatgtgcatgcgtctttacagcagaatgatttataatcctttgggtatatacccagtaatgggattgctgggtcaaatggtacttctagttctagatccttgaggaatcgccacactgtgttccacaatggttaaactaatttatgttcccaccaacagtgtaaaaggattcctatttttccacatcctctccagaatctgttgtttcctgactttttaatgatcaccattctaactggcatgagatggtatctcattgtggttttgctttgcatttctctaatgaccagtgatgatgagctttttttcatatgttttgtttttccacataaatgtcttcttttgagaagtgtctgttcatatcctttgcccagtttttgatggggttgtttttttcttgtaaatttgtttaagtttcttgtagattctggatattagccctttgtcagatggatagattgcaaaatttttctcccattctataggttgcctgttcactctgatgatagtttcttttgctgtgcagaagctctttagtttaattaggtcccattggcttttgttaccattgcttttggtgttttagtcatgaagtctttgcccatgcctatgtcctgaatggtattgcctaggttttcttctagggtttttatggttttaggttttatgtttaaatctttaatccatctggagttaatttttgtataaggtgtaagaaaggggtccagtttcagttttctgcatatggctagccagttttcctaacaccatttattaaatagggaatcctttccccatttcttgtttttgtgaggtttgtcaaagatcagatggttgtagatgtgtggtgttatttttgaggcctctgttctgttccattggtctatatatctgttttggtaccagtaccatggtgttttggtactagtaccatgccgttttggttactgtagccttgtagtatagtttgaagtcaggtagcatgatgcctccagctttgttctttttttttttttgagacggagtctcgctctgtcgcccaggccggactgtggactgcagtggcgcaatctcggctcactgcaagctccgcttcccgggttcacgccattctcctgcctcagcctcccgagtagctgggactacaggtgcccgccaccgcgcccggctaatttttttgtatttttagtagagatggggtttcaccttgttagccaggatggtctcgatctcctgacctcatgatccacccgcctcggcctcccaaagtgctgggattacaggcgtgagccaccgtgcccggcccccagctttgttcttattgcttagaattgtcttggctatacaggctcttttttggtttcatatgaaatttaaagtacttttttctaattctgtgaagaaagtcaatggtagcttgatgtgaagagcattgaatctataaattactttggacaatatggccgttttcatgatattgatttttcctaccatgagcatggaatgtttctccatttgtttatgtcctctcttatttccttgagcagtggtttgtagttctccttgaagaggtccttcacgtcccttctaagttgtattcctaggtattttattctctttgtagcaattgtgagtgggagtttgctcatgatttggctctctgtttgtgtattattggtgtataggaaagcttgtgatttttgcacactgattttgtatcctgagactttgctgaagttgcttatcagcttaaggagttttggggctgagatgatggggttttctaaatatattatcctgtcatctgcaaacagagaaaatttgacttcttctcttcttatttgaatacgctttatttctttctctttcctgattgccctggccagaacttccaatactatgttgaacaggaatggtgagagagggcatccttgtcttgtgccaattttcaaagggaatgcttccagcttttgcccattcggtgtgatattggctgtggatttgtcataaatagctcttattattttaaggtatgttccatcaatacctagtttactgagtgtttttagcatgaagggattttgaattttattgaaggccttttcagagtctctctttttctattgtttggaatagtttcagaaggaatggtgcaagctcctctttgtacctctggtagaattcggctgtgaatccatccggtcctgggcttttttttgttggtaggctatcaattattgcctcaatttcaaaatgtgttattcgtctattcagggattcaacttcttcctggtttagtctttggagggtgtatgtgtccaggaatttatccatttcttcttgattttttagtttatttgtgtagaggtgtttatagtattctctgatggtagtttgtatttctgtaggatcagtgaggatatcccccttatcattttttattgtgtcaattagattcttctcccttttcttctttattaatctggctagtggtctatctattttgttaatcttttcaaaaaaaaacagttccttgattccttgatttttttatggtttttttttgtgtctctatctccttcagttctcctctgatcttagttatttcttgtcttctgctagcttttgaatttgtttgctcttccttctctagttcttttaattgtgatgttagggtgtcaattttagatattttctgctttctactgtgggcatttagtgctataaatttccctctaaacactgctgtagctgtgtcccagagattctgatatattgtgtctttgttttcattggtttcaaaggacttatttatttctgcctaatttcattatttacccactagtcattcaggagcagcttgttcagtttccacgtacttgtgcagttttgtgtgagtttcttaatcctgagttctaagttgattgcattatggtctgagagactgtttgttatgatttccattcttttttatttgctgaggagttttactttcaattatgtgttcaattttagaataagtgtgatgtggtgctgagaagaatgtatacactgttgatttggggtgtagagttctgtagatgtctgttaggtctgcttggtccagagctgagttcaagtcctgaatatcctggttaattttctgtcttgttgatctgtctaatattggcagtggagtgttaaagtctcccactattattgtgtgggagtataagtctctttgtaggtctctaagaacttggtttatgaatctgggtgctcctgtattgggtgcatatatatttagtatagctagctcttcttgttgcattgatccctttaccattatgtaatgcccttctttgtcttttttgatctttgttgatttaaagtctgttttatcagagattaggattgcaacctctgctattttttttttttttttttttttttgctttccatttgtttggtaaatcttcctccatccctttattttgagcctatgtgtgtctttgcatgtgagatgagtctcctgaatacatcacactgatgggtcttgactctttatccaatttgccagtctgtgccttttaattgggggcatttagcctatttacaatttaagattattattgttatatgtgaatttgatcctgtcattatgatgctagctgtttattttgcccattagttgatgaagtttcttcatagtgttgacggtctttgcattttggtttgtttttgcagtggttggtaccagtttttcctttccatatttagtgcttcctttgggaactcttgtatggctggtggtgacaaaatcccttagcatttgcttgtctgtaaaggattttatttctccttcacttatgaagcttagtttggctggatatgaaattctgggctgaaaattcttttctttaaaaatgttgaatattgaccctcactggcttgtaaggtttctgcagagagagccactgttagtctgatgggcttcctttatgggtaacccagcctttctttctggctgcccttaatattttttccttcatttcaaccttggtgaatctgacgattatgtgccttggggttgctcttctcgagaagtatctttgtggtgttctctgtatttcctgaatttgaatgttggcctgtcttgctaggttggggacgttctcctggataatattctgaagtgtgttaccaacttggttccattctctctgtcattttcaggtacaccaatcaaacgttaagtttggtcttttcacatagtcccgtatttcttggaggctttgctcgttccttttcattcttttttctctaatcttgtcttcatgccttatttcattaagttgacccttaatctctgataccctttcttctgcttgatcgatttgggtattgatacttgtgtatgcttcacaaagttctcgtgctgtctttttcagctccatcaggtcatttatattcttctctaaactggttattctagttagcaactcctctaactttttatcaaggttcttagcttccttgcattgggttagaacatgctcctttagctcggaagagtttgttattacccaccttctgaagcctacttctgtcaatttgtcaaactcattctccgtccagttttattcccttgcccgcgaggggttgtgatccattgaaggataagaggcattctggtttttggaattttcaggctttttgcactggtttttcttcatcttcatggatttacctacctttgatctttgctgttggtgaccttcggctggagttttttgtgtggttgtcctttttggtgatgttgatgctattgctttctgtttgttggttttccttctagcaggcaggcccctcttctgcaggtctgctggagtttgctgggggttctctctagatcctgtttgcctgggtatcaccagcagaggctgcagaatagcaaaaattgctgcctgctccttcctctggaagttttatcccagaggggcacctggccaggtgccagccaaagctctcctgtataaggtgtctgtcgacccctgctgggaggcatctcctagtcaggagcctcgggggtcagggacccacttgaggaggcagtctgtcccttagcagagcttgagcactgtgctgggagatcgctgctctcttcagagctgtcaggcaggaatgtttaagtctgctgaagctgcacccacagctgctccttcccccaggtgctctgtcccagggagatgagagttttatctataagcccctgaatggggctgctgcctttctttcagagatgccctgcccagagaggaagaatctagagaggcatctggcaacagcaactttgtggtgctgcggtgggctctgcccagtccaaacctcccagtggctttgtttacactgtgagggggaaaaccacctagtcaggcctcagtaatggcagacgcccctccctgcaccaagctggagcatcccaggtcaacatcagactgctgtgttggcagcaagaatttcaagctagtggatcttagcttgcagggattcttaggggtgggacccactgagcaagaccacttggctccctggcttcagccccctttccaggggagtgaatggctctgcctcgctggtgttccaggcaccactggagtacaaaaaaaaacatctgcagctagcgtgttgtctgcccaaatggccctccagttttgtgcttgaaacccagggccctggtggcataggcacctgaaggaatctcccagtctgcgggttgtgaagaccatgaaaaagcatactgtctgggccagagtgcaccattcctcacagcatggcttcccttggctaggggagggagttccccaaccccttgcacttcccaggtgaagcaacagcccaccctgcttctgctcaccctccgtgggctgtactcactgtctaaccagtcccaatgagatgaactgggtacctcagttggaaattcagaaatcacccatcttctgcgttggtcttgctgggagctgcagactggagctgttcctatttggctgtcttgcccaggaacctcatgtgtttatttataagtgacaaatttaggaacatgatttaggctcaatattttattatcacatcaaaaatcatctctcaggaatcttaggccagatcagaaccctgacctttcctcatcttacagcagattctctcctcccattggtggctgaggtcaacccaccactcaagaggaagaattcttcctgcccaacgtagttcctgtccctcagctctgctggagacaggtgtgaatacccacacccatcacagcacaggctgtgtgtctgaggaagggatcaaccaagcaagcaagtggcatcactgattctaccataaatgcttagatgtgttctggcatcttgaggggtggagggaatgttgaccttatggatccatcaatgggaccacagcactcccggggagctaatgtaggaagaaaatggaattacatttgcctcccttctgttctcaaaagtaactaagacccttgaaaggccaaattttaactacaggattctcattgactatatgtatacacgctgcattctttatccttacaactcaatgaaaatgataggcttagacaacattagaccatctgtacctgaagcaaagataaagaaggaaccaaaggaagaataggcatgtgagggtgaggcaggaaaatagagtctggaggcagggaacataaggccaattcacacttcagctgtaacaggaaatatcctctccgtagggtgtacaccataaatgactgtaactttacttcatcctctccatttacgtagggcgtacccaaagtaaccagtggaatcctctagcgggtatttaaactctcgaaaattctgtaatggggcctgtgagcccctatgcgcaggcccgctcccacactgtggagtgtactttcattttcaataagtcccttcattccttctttgctttgtttgtgtgttttatccaattctttgtttaagatgccaagaacctggacacccttcatttttaaaaagagtagccatcttggacaaagcagattgatatttcctctcctttttaaaatttcccgtttccttatttcccatctccttgagtcacaattttctattcttgagcagcaagctcaacttctccttttacaaacacagcggtgtcactgattctgctgtgagtgcttagatgtgctctgggatcttgaggggtggagggatccatgtattaagggtagagaccccagggtgagtacctggcttccagtcatgattctgctcccttagtacctacatgcccttgtacaagttactgaacatctctggcatccatttccggatttgtggattgcagctaatcgaaacacctaactcatggatgattgtaagtgttaaatcagtcattacaagtaaggtgcctagaacagcacctgcatgggctatcactcaataattgttggctaccattattattgccacaatttccagagctgggacaggatgtcttcctactaaatgaagggagttcacttccacttcaatggagaaagtaatggatagaatcttccattaagctttcagttaaattttgttataacatgtttgttcacaaagaaaagggaggtgtcccactaaatctccaattggtggaaatcacagaagagatattcttgactttaggacccctagcttctctacctgctgtctttaccggcagagatcagcccctctgggaacaagctaaaacttctgagctatgatgttcacaggactcagattaaagaaataatcatgtttccaggaaagaatgtagttggccccaggaattccccaaaccttattgatctgagcccacagtcacacatcatgcattgagactgtttgggggacagtctgtctgggtttgttcttaagttcaagttagagcctttcgaaaagcatccaaaggctgacatcacgttactcctggcagtccttagggctctgactttaaagacgaggttagaataatttgtaatcagcacttttactacttagaataatgattgtttcaaaaatcttggagtccacatacctgttttatttatttatttattatttatttatttatttatttattattaccattttttgagatggagttttgctctgtcgtccaggctggagtgcagtagtgcaatcacagctcaccgcaacctccgtctcctgggttcaagagattctcctgcctcagcctcccaagtagctgggattgcaggcacctgctaccatgcccagctacatatctgttgttttagagtcaaactttctctcctagttgtgattcagggttaactgacatcttctgatgaaggcaaggtgaacttaaaaacaccccagtatacacttcacaccttttaaatgagtgaaacctgaaggaaggcatttggaaatatactggcaacccacaacaggaaagtttggttttgctacttttagcagtatgggaaaaaaattttctgattcacccctgtgatgaataaggcatacatatctatacagcagccagatgaggatggggagctatggggatgggggtagccatgcaaaaacagcttatcctcctcgggcaccagatgaacacacagactaatccacactcatttccagactgcccacctgaccaattcagacaaccaggctgttagtagttctgccacagaggatcaaaataagggccagagagacttccttatattctttttagaagcacattctgagtaccatttgcattttttcccccaaagactgttctaaatagacactctgtcacttttaatatgggccttggagacctgaaacactgtggtcttctgattctgggggaaaaaaaggagggggcaggggaagagtttctagttcatcttacattaccccctgggaattcagctccaaaccctgagtaattctcaattatgagcatgggccacagatgtggctctggaatgcaacttagatttctttcctggaagaaactcttcaatgcaattgcttaggctagtgacttcctccaagaactgactttagtgcttgcttattggatgttttgggtttgtccctttcttatcaggggatttatcttattgcaaatcacactatggcttaaaagtttaagtcaaatcaagtatggtatctggcaaacatgaatgagtgcttcctagcttctcgtgcttattggcaatccttgacattccctggtttgtagctgcatcactgtattctctgcctccgtcatcatagggtgttatccctgtgtgtctgtgtccaattttccctcttcttataaagacactagttgttggattaaggagcactcaaattcgtgatgatctcatgttaacttgattgcatctgcaaagaccctatttccaaacaaggtcacattcacaggtttcagatagacaaggatttttgcaggacattgttcaacctagtacaaaggcactatctcatttaatcctcacaacaaccatattagcccaattttatggatgaagaaacaaattgcttccagatcttcatttctactgtgtccaactcttaatggacctctctattaagatgttgcactggtacaaagccaatattccagaaacaaattcatcattgcccaaacctccccaccactcccttttttttttttaaatagtcttactatctatcctctaatcaagtcagagacatctttggcactcctccaccatctatctccacatttagacagtcaccagagctattaaatttgcctctttggtattttttaaccttttcattcctgtgcattccttctgccactgtctcatttcaagtcagtggtggtactcttcacttttagatatgagcaattaatagttttccaatcttatgtgaagtgctctgcaaaaggcagtttcagatgactccctccaaagaggcctttactctcctaaacagacattctcgagttactgtgtttcaggcttcacatttctaatctatattattataacttttccccagttatctattctgcatattgaaaccaacacaaaagttactgacttaaaacaacaatcatttatttagcccatgaatctgatacttgggcagaacagtgggatctcatttctgttccatgcagcatcagctggggtggctcgaaattgcctgggagctggagcagctgaggcttcttggacctgggacctccctctgtgcctctgtgtagtctctctcctccatggtggctttggggtggccagactcctcacatggcagctcagggcttaaaaactgcaggtcccaagaaagagaaccaggcagagctgtatctccttttatgatctgactttggaggtcacagagcatcacttctcctgtccacccctactccaggcagtcacagaggtctctatggctcaccaagacctccaggctcaaggggaggggacctagagtttacctcgagaaaggcagtggcgaggttctggaggattgtgtgggattagaaagcctgttctggccgtttttggaaaatacgatcttcacaacatgtttctaacagctcttcctgcctccgatcaggtccttccccaattcggttttccccactgatgccagagtaatctttcaagacctaatatgatcatgttaaccatgtttctctcctgcctaaaatctttgagtatctcctcattcactttatttatttttatttttaaattttattttaattttatttatttatttatttattttgagatgaagtcttgctctgctgcccaggctggagtgctcactgcactcagcttactgcaacctctgcctcctgagtttcagcgattctcctgcctcagcctcctgagtagctgggattacaggtgcgcaccaccatgcccagctaatttttgtatttttagttgagacggggtttcatcatgttggccaggctggtcgtctcgaactcctaaccttgtgatccgcccacctcggcctccctaagtgctgggattacaggcatgagccaccgcgcccggcctattttttattttttatttttttgacacggagttttcgctcttgtcgcctaggctggaaagcaatggcgcgatctcagcttactgcaacctctgcctcctggttcaagctattcttctgcctcagcctcccgagtagctgggattacaggtgcccgataccatgcccggctaatttttgtttatgtttagtagacatggggtttcaccatgttggccaggctggtcttgaactcctgacctcagctgatcccgcctgcctcagcctcccaaagtgctgggattacaggcatgaaccaccgcgcccggcccccattcactttaaatgatgtctaaatttcttaacgaggcatacaacagcctttgtgactgggtccccatctctctcaagactcatctcgcatttgtgatctttgaattctccatgcctcagttacgtgtcagctggcagataccagaagtcaccgcggcctctcacatcccacagccttttctcatgcggtatcctagagtacactcttaccacatttccctctcactcagtggaggtgtctcctctgccccccacaccccagtcctatgcatttaactctgttgttgatctccatcataataatgctttcttttttgttgttgttaatttcaagtagattgctgttttctaatcatgaaccactccactaaaagatataattactttatggtctcttcaacaggattttaccatgttgagtgctggatatttttatagctctataaatgttcttaaactttcttccgagacacagttaaattacttggaaacagtttgaactttccaggtcttgcttttcagattcattagctgacacgagagcagcactcagctaggactgattattcccactactgaggccagacctttctgactagccagtgccccacaaatcatgaggctctccctctggctgatggaaacaggcacggttcttgaccttgtgggagggccaggcagtctttcctctaatcctttcacttggttcttttttcccagtcctgggtagtttcttcccaggacttgtgtagactgtcttgtgtgtagtcagtcttgtgtagactgactgtgctgaatacttgagggagacctgccacagctctctggagttctctctgtgccactctctcttctcttttattctgtccagtgatcactagccactttagtgtctccaaactctcagcgccatctgcccatcagtgagtccaccaggtatcacataggtccctgctcctggcactgtggcttggaaaccctctcaaggcattaagctggggccaacataggacttagctctcatgttttcattttctcagggatcactgtccttcgttgcccaattcccagcgtctggtaaactgttgtttcatgtccattgttttttgggtttgtggttgctgctgcttcgggtgggaggggatagattcaatccctgtgactctatcttggccagaagccacactctctaatctcatgctgatgttttctgtgttgacctgtcctgctgccacctgtcctgtgagctccttcaaggcagggctgtgctgatgccaagggatttagcaccatttttgtgctattcataaagtccacaaatgtttgttgaataaagtaagtgttagactccaaaacatacaaagatgaataagacaatatctacaatatctctgtcttgaaaaaacttagaaaccactgggaagacaaatctcatgaagaagcattctaggctacttgttttgggggaaaaaaaaaaaaagaggaacagagaacgcagcccagatgaagagggagtcagaataagagtcagtcctggcacagatagaactttcttgaggcactactttcataaactgttcatagatgttttgtaacaaaagggttctggtcaaaccagtttgagaaaacctgggttaaatagatttcaacacgcctcttactgcaggaattaccagaatctttaatatgttcgtgtgcattgtgatgttttgagaaggggataaaataagcagtgtttcccaatactgttttgatgatgggatctctctgatcttaacacatcttggaaggctgacatttcttggaaagcacattgggagacacctttatagcatcgtcaatgtgtgattgttcagcgtttgtttctgtatctccaatatccatgaggccacttctgcggagcagcctcttgctcttctgccgttgcgcaccacagaacataaagttcttcccatgttaaggctacatctaacttcccataagtcttcaagttataaaagggcatagtgctgggttattctaaatagtaagctcccctagtgtgcagagagtacagtgtacagatcttggacattctcattccatttaagaatcatagtatctagttgggcatggtggctcacacctgtaatttccacactttgggaggctgaggaaggaagatctcttgagcccaggagtttcagaccagcctgggcaacatagtgagactctgtctctacaaaaaaaaattacccagtgtggtggcacatgcctgtggtctcagacagctactcgggaggctgaggtgggaggatggtttgagcccaggaggtccgaagctacagtgagctatcatcacgccactgcattccagcctgggagacagagtgagaccctgtctcaaagaaaaaaaaaaaagaatgacactatcacaaagggaccagtacacaaagtggttcagtggttcaaactccattttcagcagcaaaaatggttttgttttgcttcgttttctgagtaaaatcttacgtgaaatcttacatggaactgctcggttgaaaaggcgtggggctcctgcttgtctctcacactctctctgcctgtgaaaatgcttaaagcaccttggaagaatactacaaaaatatgacaattactgatttaattgattcttctagctctaaatgagaaagtacttatgctattccagatatataggtgttcattctattttaaaagtatttcctgaaaatattttcattcttctcctttcctgatatgtaatatccttctaagcaaggtgcttagtctaagcaaggtgagaaagtctaaggacaaccaggtgctgccaaacttctgttgtccgtagtctgctgtcagagagacgtgggtgtctggtttcctgttagaacaccctacattttgtgatgaaatatctggtttccttcagaaaacaggttgagtgttaactcttggaattttgcctgccctcagttaattgcacaaccttgatcaatgcagacctgagtcctcccttcccagacctgagtcctctctttccaacatcccaagaggttgttccttcaaagagaaaaattaaaaataaatatatgtagaccacaaggaagctgataggggctctggtcacactggggagctgtctcaagcctggctggggcagagtcagggctgggctcctgggtgtcccaaagctctgcatttacccagagacaagaaaaggacttttcaagtttaattgaaaacaggatgaccctgctagacctctcattgacattgctaaaaataaagtagggaagtagcctggtctcttcacggtttaatcccattaaatgtagaaggggtggggactgaagctagtaaaagacatgatttgtctcagatggctgtctggggttgtatttttctcctctgtgctatgcagtcccagattttaaagttctgatacaatcagctctcggttgttgatgccgtgggaagggagcaaagggacagacaatcctgccactgtggctctgcagggctgtcacccactcactctgggggccattgggactcgtcacctcgactctctgctcaccgttcttgtaccacccctggcataggcctggctttgtaaataacccactaattcccatctgatctgagtgtcacgaaagagtcatctgtgagcctcttaaagaagaccccacttcctcctcaaacccacaacacactcagacgtggtgcctcccaccccattccagaagccctgcttgcacatatgttcacatcggggacttcggacgccgttcattttgtgggggaagtagtgggagttgtttgttgtattaactgattctcgtttctctgtgccaaccccactcctttagcctaatactgaatagcaagactggaagactttccgttgagtgtgagagcttcacatacattcatgtgcttgcttgagctttcattcatttcttcaggagtgttaagggaataacccctagattattacacagttgatttttcatcagaatcccaagaagaagaatttcgtgggccacaaccttagaggctgaaaggtccaaagagtgctccagaccagtgggttttacttgccaccaggggacccagaggtagcctaggcaagggctttcataacagctatcaaggcattactgggatgactatacccatctaaatggggatcattgaaaaataaggtgctttttgtgccacatatgagacctcccaagtcctgtgctagaagattgtgagacatgaaataagagagagcggccaggcacagtggctcacgcctgtatttccagcactttgggagactgaggcaggaagcccaggagttcgagaccagcttgggcaacatagagaaaccccatctctacaaatattttttaaaaaattaactgggcgtggtggtgcatgcctttggtcccagcaactcaggaggctgggacaggaggattgtctgagaccaggagatcaaggctgcagtgagccatgatagcatcactgcactccagcttgggcaacagaatgagaccttttctcaaaaaataaataaataaatgaataaataaataaataaataaataaataaaaatagagagcatatcagtcttgttgacaattgtatctccactgcttagctcatagtggacaatacataattattaaataatttacaaatgactagttttctttttttaaaattttactttaggttcttggatacacgcacagaacgtgttggtttgtatacgtgtgccatggtggtttgctgcacctatcaacccatcaactaggttttaagccctgcatgcattagatatttgtcctaatgctctccctccccttgacccccaccccacaactggccccagtgtgtgttgttccctccctgtgtccatgtgttctcattgttcagctcccacttatgagtgagaatatgtggtgtttggttttctgttcctgtgttagtttgctgaggatgatggattccagcttcatccatgtccctgcaaaggacatgatctcattcctttttatagctgcatagtattccatggtgtatatgtgccatattttctttatccagcctatcattgatgggaatttgggttgattacatatctttgctattgtagatagtactgcaataaacatacatgtgcatgtgtctttatagtagaatgatttatattcctttgggtatatacccagtaatgggattgctgggtcaaatggtatttctggttctagatccttgaggaatcgccacactgtcttccacaatggtcgaactaatttatgttcccaccaacagtgtaaaagcattcctatttccccacagcctcaccagcatctattgtttcttgactttttaataatcaccattgtgactggcatgagatggtatctcattgaggttttgattcgcatttctctaatgatcatacgctttttcatatgtttgtaggctgcataaatgtcttcttttgagaagtgtctgttcatatcctttgcccactttttgatggttttttttttcctgtaaaattgtttaagttccttgtagattctggatattagacctttgtcagatgggtagattgaaaaaaattttctcccattctgtaggttgcctcttcactctgatgatagtttcttttgctgtgcagaagctctttggtttaattaggtcccatttgtcagttttggctttttttgcttttggcgttttcatcataaagtctttgcccatgcctgtgtcctgaatggtattgcctaggttttcttctagggtttttatggttttgggttttacagttaagtctttaatctatcttgagttaatttttgtataaggtgtaaggaaggggtgcagtttcagttttctgcatatagctagccagttttccagcaccatttattaaatagggaatcctttccccattacttgttttgtgaggtttgtcaaagatcagatggttgtagatgtgtggtgttatttctgaggtctctgttctcttccatttgtctatatgtctgttttggtaccagtaccatgctcttttggttactgtagccttgtaatattgtttgaagtcaggtaatgtaatgcttccagctttgttctttttgcttacgattgtcttggctatacaggctcttctttggttccatatgaaattaaatttttttttctggttctatgaagaatgtcaatggtagtttgatgggaataacattgaatctttaaattactttgggcagtatggccattttcacaatattgattcttcctatccgtgaggatggagtgtttctccatttgtttatgttctctcttatttacttgagcagtggtctgtaattctccttgaagagatctttcacctcccttgttagctgtgttcctaggtattttattctctttgtagcaattgtgaatgggagttcatttttatttggatctctgcttgtctattgttggtgtatagaaatgcttgtgatttttccacattgattttgtatcctgagactttgtgaagttgcttatcagcttaaggagttttggggctgagatgatggggttttctaaatatagaatcatgtcatctgcagagaaaatttgatttcctctcttcttatttgaatatgctttatttctttctcttgcctgattgccctggccagaacttccaactatgttgaataggagtggtgagacaaggcatacttgttttgtgccagttttcaaagggaatgcctccagcttttgcccattcagtatgatattggctgtgggtttgtcataaatagctcttattattttaagatatgttccatcaatacctagtttattcagagtttttaacatgaaggcctttatcaaaggccttttctgatctattgagatgatcatgtgttttttgtcatttatatgtttctgtttatatgatggattatgtttatttatttgcatatgttgaactagccttcatcccagggatgaagccaacttgatcatggtggataagctttttgatgtgctgctggatttggcttgtcagtattttattgaggattcttccatcgatgttcttcaaggatattggcctgaaattttctttttttgttgtgtctctgccaggcattggtatcaaaatgatactagcctcataaaatgagttagggaggagtccttccttttcaattgtttgggatagtttcagaaggaatcgtaccagctcccctttgtatctctggtagaatttggctgtgaatccatctggtcctgggcttttttaggttggtaggctattaattactgcctcaatttcagaacttgttattggtctattcagggatttaacttctttctggtttagtcttgggagggtgtatgtgtccaggaatttatacatttcttctagattttcccgtttatttgcatagagatgtttatagtattctctgatgatagtttatatttctgtggtgtcggtggtgatataccctttatcattttttattgtgtctatttgattattctctcttttcttctttattagtctagctagtggtctattttgttaattttttcaaaaaaacagctcctggattcattgatttttgaagggttttttgtgtctctgtttccttctgttctgctctaatcttagttatttcttctcttctgctagcttttggatttgtttgctcttgcttccctagctcttttaattgtgatgttagagtggcgatttgagatccttctagctttctgatgtgggcatttagtgctataaatttccctcttaacacagctttagctgtctcccagagattctggtatgttgcaaatgactacttttcaattctctgaacaccactgactgcaagtaaggaagggaagagaggtaaatttgggaaatgaatgtgaataggaaaatcaaatttaatgtcacttccatcttttgttgctcgttggagaaatacagatccctaaacactgtgaggcctcagtggtctttccctgcttgctctagagccacattgtgtactgaacgcccccacactctgttgacctccttgccacgctcccactctgggcttccacatggtgttttgctcacccctgatttatttaagccctatgctttcttcacgtctttgtgcaatcatcattcctcagagaagcctaccctaaccctcctggcaaaacctaactctcccactatatcatcacagaagccatgcactcttctttctagcacttttctcaacaatggttttacatgtatttctttattttactaatgtctgccttatttcacagcaaaaaccatgagggaaaggattaggtcaatgtcaatacctggtacacattagttgcttatacatatttgatgaatgactgagtgagtggatggatgaagaggcagtcacctaagagcagggatttccatgacctggggtctatggatcagcttctaaatacccaaacctctgagatcgtctgcaatggtgggtgggtttgcatggtttctaagggaaaagctcaaatcttttgacagattaagtctttaaggggtttcacatgaatatgtttaattatgtgaagagagagagaagaaaaagaaaagaggaaactaaaaaaaacatataaaaggataaaggggaactttataaattggagcagtgcagaataaaggtgagagagggaaagaatgagagggcaactgggggacagttattcctgaataaattctttaaactaagtgaagttgactgtattcaagaccctatgttaggtactatcagggattcaaaaaatagatgtgactgctaccctcacatctaaaaggagaacattctgggtgtgaattcaaggtaaatggaaggaagtgatatgagagaggttgggttggagccccttgctagcacagagggagggagattgcacatagcaatagaagaagggaagatgatggaaggcttcctggaggagggtaacattttgatctgctcttaacacatgggtaagagtccaaggaggaggggagatggggtaggtgagcactcaggtgagagaagaatataaacaaagctgctggtccaggacaccaaggagcgtatcatgttgtcagactcttgacaacagcctttgtggagcatctgagctgggagacacctcctatggccagtcacaggcacaaagccagtggcatctagaaggaccacgtgagacaaacttactgaggccagaacagacttggagaaggaacaatccagccccaaagaagattgataatgaataaatacacagcccccttaaaacttctggcaaaaataaacttatcccttgtctgtaagtgctcttccccgcaacacctctgcaactcctgaaacagctccatgcgctctcctttaaggaggttgtgctaatgtgatctgcagggatgccaatttctaaatgttgtgttattgttgtcctaagattcctgggcttatgaattcaccaaatatttagatcatatgagcttgaaatgtatgtgaggggtgtgcatgttttcatagttggtgccgattccattttgactatgtcaagagttacgaaaagcttccactgtgggagcaaagcaagctggggagaggttgctagacctcaagacttttgctggtgtgaaaagacacctgctgtctactgttactaaatattcacctgggcgtgttaaatctcagggcctctcttctcccatttgcaaaaacagctccatctctccggcctttcctagctcccccaagaacttacgtgtccccggcagtgaggcacatggcactacagccccagcacagttggtggagcagacctgggctgggatgacagcaggcaggggaccatgatgaggagggcagacgatggctcccctcttgtctccagagcacacttcagtgagcatttcttgggaatgaaatggctcagcttaccccagggacacccataatcctagacagcaccctaactctgcgctttacctcccagaccaagtcgctgcagagtcagctatggagttcagtaagcacattgggtgggtttgagacagactcagggagcctgtccagaagcatccctgagggatgggatcagcctaagggccagcacactgggtgagtctgttttcattcttattttgactgagattagagtacttaccctaccttatccagaacatgttaggaacttctggcagggttggtcctgagcaagactgtaaagcagctcaggtgaagcttcagtgtctttttctgctctcacctttcccatttggaggcgactcccctcagctgctttcctttctctgtcctctgcacctgccttgctgcccctagagctccagaactctctgaaattttctgcctactccctggcaaaatctattttttctaaaaattgtccccagggccaagatgcccaaagtgactctgattagcaaagtcatgatctggggataaaaacaatgacttttcattcctcttcccaaataaaaactacctttgaccacagaggtcaaagggcccttactgagtcccatgtggaggtcacaggcatggggtgatagtttcagtagtgcttacaaaactccacagaatcctctttcgcccatcagatctcatagctgtacccagtttagctcaggcctgaggatgcataataattcagagctctgatggcaggtggtttccatctcaggactgcctggaagcttgctgagaaggaacttgagaccattgtcacacacagggagaaaagcactggaatggactagaagtctgcctggggaaacatgtggcatgcacttacagagtgttacatgtctgtcatccttgaggagtcattgtggactctcaagggtccatgataggcatccacttgcctctctagcctgaagaatgtcatctgcagccttgctcctcaaagtgggaaccttgcttttcaaagcagcgtcttcagaacagcagcatcagcatcacaccggagcttattaaaaatacagactctcagccccacccctttcccccacactacccaatcagattctgcattttaacaagattcccaggggatttgtatgcacataaacaatggagacggctaggagaggtggcgcatgtctgtaatcccagcactttgggaggctgagggaggagaagcttgagcccaggagttcgagaccagcttgggcaacataatgagaccttgtctgtacagaaaaaaaaaaaaaaaaaaaaaaaaaaaaaaaaacgccctgtgtggtggggagtacctctagtcccagctgctgctcaggagactgaggtgggaggattgcttgagcctatgaaatggagcctgcagtgagccgtaagcgtgccactacactccagcctgggtgacagaatgagaccctgtctcaaaaaacaatcaaaaaacattggagacacaggggtctactgggtcttcctgctggttgtccctcctgaaggtcctcactggaggagaacaagctttgtgggcccggcttcttctacctgtgcctccacatcttataccaatcaataggggtaggactaggtccaatgcggatggggacattcccttcagcccgcatttgggaggtttaatgataggtctattgtgtgccatactgtttttctgtcttaccaccatgtcgcttctgtccccaggcaatctataagatggtttcctctgtaatgaaaatgcctgaagatgagtcaaccccagagaaaagaacagaaaagatcttccgccagatggacaccaatagagacggtaggaggcgggggctacactgctttgctcagatgggggctgctggaaggactggagagtccagactgggaagtgccactcgaggcccttcaatgtgagcggctcatcctccaagcctcctgggtgggtaggaggggagaggaccaggtggccacaggagagctgagcccagaattgggggaaatgccttatttctagttttttctatcctccttgtaggtcaacttctacctccaagaaaacagaatggatcttgtggggcaagaatgaaaggaaccaagaaaccattgttagcacagacccatccttgggacaggcctaggctatagcaggctgggtccctgcagtccagttcatcaaaatggggagagggttgttattctgtgatcctacccagatgccgacagctttcactccagcctgccaaaggggttttgttggggtctcctgtgcatgcactgagatgttgtgtttcccagagacagtgggctcccatagtcactggggtgcccggggtagtggtgagggagtaaggtgcccagcaggttcccaccctgatggtgctacccacaattcaaacccaacgaagtgaaaaagaaggttgcatttccaacttaagaacagaaggattttagatcttaaattgccagatagaatacaggaggcccaattatcctggaatttcagataaacagcaacagttgttaggattagcctaacaattgtttagccaactaaaaaagtcacttgctgtttatctgaaattcaaagttaacggggcatcatgtatttaatttgccagatctggcaaccctatttaaatgttatacttgagtttaaagagctcagctcagggcccggctctgtagctcttgctgttattatcagctcacccgatctgttcagaggcctcggcaattcttgtcaaccatgtgcacaggcacttgggtcccccacctggcgctgatctatagaacagcagaaggcggcttcgcagtacagagagcctctgtctccttttatcccccgcccaggtacagctgcctaagaatctgggtttgtgtggtatgggcctgtctgcttgcttgtttcctccacaaaggtgccattccatttggaaacatcctatgtccccttatttgctttgattcacaatgaatagttgtgactaaacaagcacgggattattttaatagttaattaacttgctgatgttaaactgcaggttttactggtactcaagggagcacaatgggtttgtgctgtgctctaggtccagacagctcttcaggatagggctgaaggatgggagaagatcagatgtcacaggataaagccctaaagccctaactgtgtgttgatcacaggcaatgaattagggtctttccactgggactctgctgctatgggattgcagagccctgactgagttagcattctcagagcacaacttactgctaaagacctgtgcctttccaaaggaaaacctcatgtttaaaattaaattaaattttcaaaggttagggttgggagaggggggtgggagctgtagaaggaaggaggaagaggggctgtaagttcacagctgtcagaggaatcttagctcaaccaggagactgggtgcttcagctcagtgcttggctgctggaccccaggattgaggacacctgcacccctccctgccgagagcagagcagtcctcacctagagtctcctacccttagatttagcttgcctgttgctcttggaatctaacttctggcctccgatttgaaaagaaaaatctgggccctcaggcaagttctcctaggagccaactctgaatcatgcagacagttaagtgaagaaagccagacgtcatgccgagctccaggtctgcccctgctacctccagctggtgcctcccagagccgacccctgagagactgcaaagtgttcagagatcacgcctgtctcccttccctcatgccttgccaagctggaggaagtcattaccattgtaactactatgtgggcagggctgggctcataaaaaatggccagcacacagagcttggaggggatcagctctacaaattaaaaataaattaataaatgcatccctatctttttccttcatggagataaagtgggtttcattaaacaagaactaggttctggcggggagggagttgtggctgaggagaagatatgtttgttggtgtttctgttgggggaggccccctcctgtcaggtttggagtaagttgagaaataaaagaggacagaggtcaaaagatagatactggaggctatggcttagcgtgagagtccaaggacgtgctgaaaaacccacaggcgtgcagagccaggcaggccgggtgctgcccttggaggagcagatggaaataaatcctctctggggcagctcctttcaagagaaaaagggagggcaaagctgggcggagatgcccagcaattcctcccaaatttaccaatcgagcatgtcacttcactcccaggggcggggtagacaaagaggaagggtccttctggaagcaccaggaatgggaaaagccttgcagtcccccaactcctaccccaccccctcccctcctctccacaagtgacaggccttcctggaagagaattctgtacgtgctccagagtaagcagaaaggaaaggtcaccggggtcggagtgggagcccaggctgctgagcctccctcctccagcacatcagggtagcaggagagcaccctaactgagaggcagaaacccatgggttaccctctgccttgaacataccctgctcttccctgacctcagatggaggcacagctgtcttcccgtggtgtatgaacaaacacttacgtccacggcttcttccccaagataggatgggctcttgcagcaaacctaagaacacagagtggcctgaagaacacgaagtggctcagaaggctccagggaacattatgggaaccaaccgggtgctgccagggcccagctcattctcataaatgcaggagggccacttgctttacaaatgctgagtgagcctctccagggcgcctggagccaggaggtcagggaccaagtcagcatcatccaccaccctctccccagtcccgggcccagggccgggcacacagtgggctctcaggcagcggcgtttgattgccacatgtactgtcctaagtgctggcaatgccatggtgaatgaggcagcagtgttcctggagattccactgggctcttccccgggacaggtgagtgctgtgtgtcacagtggcagtgaggctgcaggcaggtgaatcgacactgcccagcacgcagtagtgggaagggtgtaagctcatgcagctgccaccagccaccactcacctgtcctcttgcttcctaggaaaactctccctggaagagttcatccgaggagccaaaagcgacccgtccattgtgcgcctcctgcagtgcgacccgagcagtgccggccagttctgagccctgcgcccaccaatcgaattgtagagctgcttgtgttcccttttgattcttctttttaacaatttttttttttttttgccaaacaatatcaatggtgatgccgtcccctgtgcggtctgatgcgccttcctccgtgacgccttcagcttcttttgtcgtggatgcttcgtgggaatgcccagagccccagtgtgcttgtggagagcatggacagacttcgtggtgttcattgtttgatgatttttaatcgttactattatttttttttattctaatgtctctgttctaaaacgtaagactcgggggttggggcaaaagaagggaaacccatccagtcctgtgattctattgcaagcttcaaggggcttttgtttgaaagacaaaactccccacctgaatctgttgtcacacgtgccgtaggggtgatggatggcaccggatgctggattccccaagaacaagttaccctctggggtgaggctattccagcgagctgggacatttccccatgggggcccactcccctctcttccccagcaggctgtagtttctaagctgtgaacatttcaagataaattaacagaggagaggaaaaagatggctcagctattttttcacaggtttacactagttgagctaatatgcgtgtctttggaaattaaacacaaatggtaacatattccaaaaccagacccatcttgttgcctattgtgataaaataaaaagacggctgtatataacatattgggtaatgcagaccaaattaagtgttttgccttgtttaaatgaaatgcatgtttagtgagcactaatacaatcttattccagaagactgtttttagtagcttattgtgaagtaagacaactataatgaatgtctgtcttgtttggaagtcatatctgtctttgcacaaatgtaccaatcgacaagtatattttatatattccataaaaatacaaagtaaccctgactagggcccaactttaattttgaatgcatttccagagtggccatgcctagagggcagatgcagagcaggtggtagtgggacaggacaattggagcacaggaatgttaacatgtatgacaggggaccagtagggtggtttccctctcaggcccagcagcccattgacagcattagactggcggcatggtgcttttctgagcagatcaatactctgcagactcgaaaaaacatcacatacattcttggaacttcccagtggtttaatctatgtgcatggttagggagccaggtctggaatattcagtttccctgcccctgttaaagaatcagaggttgggcagtcatcaaattcatcataaagacatgggcaagtgtgtctgtggtttccaaggcccccctatggagaatccaaaagtattttccattgccgtgctctttgaatgcagacttctatttccagaagtgacagcacaagtctgagttgctgtttggtctggtgacctcagacacactaatttgaattgaaagctaagagtaaaaatttgctggttacaggcgagtcatactcttgcaagtagttagcaaagggaggcccaaattctcaaggttgttgatggggaacttgccactaagagaaggcagagaggtccctagtgggtatatttgctgccaagccacttgccaaagaagaggaaccacagaaagagagacatcatgaccaggagaaaaatgtgactagacatgctaacctccaggtttttatatatgacttgagtctgctgtaattggcagcagaaatccaaatttgtatggtagaccaaaaagaaccaaatccatagggtgaaattttgagacctagactctgtaaaaataatcctagtcttcctccaggggtcagttcctcacagtggttctgtaccaaaacttgccaaattcctccatggccaagtgttaaaatctgtgtttggaaaatagcgaattaacctaagacacagaaggcagactgggtgaggagacctagcatgccctattggcagtgctcaggagctgcatcccacttttccctgctctgaatcgaagtcctagttccttcctttgattctcctttggtaggtggaatcagttaatgttttgagaaacctgcctgggctctgcccttagtcatgacatctcgctgagccagacccactctgttccttggaacctagagctggagtgaggagtagaggtctccggctattccagaaagaaaagtgagccacatgcaggctgatgaatgccgacacttccagaatgtatagaaatagtccctgtcctggcctgccactgaccctgtctgtattttctcggaggttgtttttctccttctccttcccaggaaggtctttgtatgtcgaatccagtgcactcaagtttggccaagggactccacagcacccagaagactgcatgcctcaaggtttatgtcactcctctgctgggctgttcattgtcattgctgtgttcagggacctttggaaataaaacctgttctgtcccaaataaaaccagcctgtgatgttcaagggactggaataaagtggcttacgacctgaaggattctacagagtgctcaactgttcatacatcattcagagtgggagggagctgggggtgctgtcccatcccatctgtatgcccacggtggatttaataatatataatttataaatcatagcctatggagtggcccgtaaatcagttgactgtgtagctcttgcctggcattaaagcatgtttttggtttaacatga

SEQ ID NO: 44 - DNA, 158101 bp, Homo sapiens
aggctgcttcgttgcacacccgagaaagtttcagccaaacttcgggcggcggctgaggcggcggccgaggagcggcggactcggggcgcggggagtcgaggcatttgcgcctgggcttcggagcgtagcgccagggcctgagcctttgaagcaggaggaggggaggagagagtggggctcctctatcgggaccccctccccatgtggatctgcccaggcggcggcggcggcggcggaggaggaggcgaccgagaagatgcccgccctgcgccccgctctgctgtgggcgctgctggcgctctggctgtgctgcgcggcccccgcgcatggtgagtatcgggctgaggggcgctgtccgcggcgcccggggctgccacctggggcgacccttctccccctcggtccttctctgtgtgggaaggccaggctcggccgccggcgcggagcgaggccactcgctgggttcccaagagtttggacatcgccgggggcccctcccgtggtgccccgccaaccgccggggttccccgccgcctctgctccccgcggcccgggaccccttacacgcctcctcggcaggagggaggccggcagcaagtctcagaaactcctttttcgtagtgccagggtgcagggaggtgggcagttttgcccttcaggttccgcgtttcttggggtcgagcgagagccgacggcgggcctcggaggggctgagcgaaggaatgccagattctggcgtggagagcgggggcagggccgccaagccaaacggcctgcaccgtcgcagccagcctcgcctttgccagggggcggcacatgggccgggtgtgtgggcttggtttggatggggacggggttttgcggcgcgcctgagttttgacactccaaccccaccgaaagtccgggggagccgtgtgtgctgctcgcgtctttgaaaggtggaggcaggagaagtagggcaactggtgtggctgcatgctgaggcacatgatttaaaaatctcaactgctgttattctttccgaggcgcggagctctgctgctgtttcaggctgtgtccagacccaggaatgtggtgtgacgatcaccaattcctccaacctggcagcagcatttgctgctcctttggcatggctgggggtggggcacgggcgggtgagaaaaagtggatacgttaattcaaagggcttccttagaaagcttctttatggttggatgtttctaacacggttggaccaaggaaagggaatcaaatcatatcttccccatcccacccacacttttagattctacatttcttcagaccctttagtggaaataacttgggctttggagccctgctctgtaatcctggattcaaatccagctctgctatatgaactcaccaataaaatgggaaagaaattatccagctaataggattaattaaaataatgtatattaaacggatgacactccaaaggtgttcagaaagtcctttcagggccgaggctgtgttttactgcttctgagattgatgctcccagtgggatgctgtcttgtgcatatttgttgaacggaaagcagccccttctttttctgagcctaatctgaataaagatttttaccttcaccaaaaaactagtacatgaactacatctgttttcaaagaaaaggttaggaagatgatgagcttcagaaaaatatggtctttgttcattgttaacagtcagtcgacatgtcaatcgcagatgtttaaaaagagaacaaggttatttatcacccgaaaatagtactgggttgttcagcaccaactagatacttcttggaaagttcaaatttcgtacacgtctaggtcactaagaatttcagaagtggaccaggaggctttgtagtgatgaagcagagccgttgtttctgaagcatttaataaagagcatatatgatggtgtttttgcttttcctttttctttgagtgaaagctttaagtgtagctttaggatagagaggagtatgatcaatgagacagtctgagggtaataatccttggtctatcattaacttgttttggtaaataacttaatcttcatgatatgtagtctcctcacctatgaagcaggactaaaggaataacctgctttagagaattgtagggaataataaatataattgtaaagtgatttgaaaaattaagtattaaataatatgatatcagaaatgggattactctgacacatagggcttcttttattataggatctcagtgcataaaactatgccctccacctctgctctgctgaggtgctgcgattattagctagcttttaggtagtcaagttgagtgttagtcaagttgactcaaaggataggatttagatattttgatttttagacaggtgttctttagatgctaaactaatgcagtagaagagatttagaagccgtttctcggtacaaatcttaaatcttcttagagtctacagtgaaggcttcttgaatcctcttaatttattattgtgttttgctaaggtaccagttgcagcacacccttctaaacttttgagtgttcctgtgtttggcttgtggccaattgttaatttaaacatcacggagtttctaaggcaaggagatgttagcagtatgtctgattgtctaaacagctatccaggaccatcctcttgctccttgttttcttttgctttgcaatgggaagtgactccctgattttgctgcctgctagataatttctcagctgaattcttctcttgcttaaacaaaatcggagtaattttctttcagatggtgatgaaatttaacctaaaactatttttcctttcactttcttattattcctttttttttggtgtggtggagaggaggaggagagtgattcctagtctctcttatttttctgaatgtttagatttaaaaaatatttacccataacttcttgggatctctctgctccattcccaccctactgcctctcctgtaggcttctatgacatagaggagcaacttttggttcacctggattgtagttgctgacttcaggacctttagagaatgtttaaattcagtgggatatgcttggatggttcagagcagccttacaatacatcttaaaaatatcacacccacagaaattctattttgcccacaaaatttgcattgatctagttcccactctgtgttgccattcctagtgatcctcctccctacctctcccattatggtagaaaaaactctgtgtcctggctacatcaaaatctgttggggtggatcttggactcagcacccagggattctgataaggtaagtttgagaatccatattttttcaaggtttacaggtgattctgacaagtaacttggttgcaacccactgattaagtacatttttttttaccttcaggtgtgtgtatgaggtctttctaaatttaagaaatttccataacaaatgtaaccttagtcattccagtgtttaacgcttctgactcaaggaatttaaaaattgctaacgtaagagatatagaatataatgtcatttcttctatttatctgggtgcaatatgtctgcattgaccctttagaagggcttcatatatttagatgatataataaattctccacctctccttttcccttttcttctgttatctctttttccttaaatgtcattcatacatgttgttttttgaccctttatctatatacgtctgcaatgattttagagtaaaaaactgcaaggcgtgatttgaataaggatataagaaattttacatcattttctttatattgtgttcacagtccatagttacatgcttcctttcttgatgtctcagttcgaatgcctaaatttgaactattgattttccttccaccctttcctgattttcctgtttttgtttctccccctttctctgcaaatgacttgaaaccaaaaggtcttcttttctttctttgtcagcctaccgtatgtgtagtattttggacagatcactgaactaggagccagaagaccagaattcttctccaggtctgttattaattggtttggtgaccttgtaggagagccactgtttccgtcctccattttctgatgttcattgttcatggtcacagagccaattagagttgagactagaattcctttcttctggtgtccagtgcctcattcactgtcctcattgcttccatctcgtgtacaaatgcgcttatgtgcacaaaaactcttataacatcctcaagtgcttattgttaatgcgtacatgaggaaggaatcgtgtattttcatttatgtgtttattctaatgcccataccctacccctgtacctggcatgatgccttggtatctaataggcacacaataaatacttgttcagtcgaacaattatttttagccattttcttattttggacaactgtggtactcctagacattttaaaaacagtatttgcaggagtcatgcttaccttacatttggggaaaaaccaaatttttcccttccccagatgtttcattttaacttgtaattttgaatttctttgtgtgtggggtttctttctttctttttctgatcacttctgcaatttataaaggtcactttgactttggaatctcacttcaaaggcactgccatccaccccctgcctctcactcaagtttgcttccactgcttcctgtattactgtattactaggccagcaatttctgttattttgtccagaatagccacaccttattgtaatttcatcattttggggactagtcatttttggaatactatttttaaaattagagttaactaagtttatatttattttgataattttttttgagatttttttcattgagttggatattgcaaacttgtactggattgagagaatatgtacatttagtaaagtatatttgcttttttttttttttgaaccaagagagtcccctgaacaccctactgacaaaaactaaagatgaaatatgatgaataaatatttgagagaatcacatggtgttgagttgtctctgccacatgattttgatccttgagggccaggtctgtgctacacacatttcttctctgtactacagaacttgtctggcatgtgccccaaattcagagtcaactgagcagcaggtcttagtcacagcatctatgactcctgctttcccacctttagaacattctataggagaggctgatggtgagttggagtgtgtttctatgttcttttttcctttgaagagataggatcagttgaaagctgaccccacccacagactttttttgctatctcttttaattaattaaggagtggctgaaattttcctctttgttgacttatgcattggcgggaactttaaaattcatctagtctttctgtccatcccatgctggatctgatgtttacaacattctagtcaagaggtaccatattttctctcttcttgaacatctcttgtggtagacagctctccacagcagtttattccatctttggccagctctaattcttagaaagatcttcttatattcagctgtaatccgtctcctcatgacttgtcctcattgacatctactcagaaatttgtctcagagtcctgagacctgtgcaggtgatagggacccaaagagatgcttgtctgtagactttactgagctgacacccagctctccataaaaggagtcaaacccagtgaggagcatgtctgaggtgattgctcaggtaaagcatcttagccctacttgtttcatacctccctgcacaggtgggcactggtgggagaataacatttatcaagcagtgtttccctaacctctcttatgataagaatagctcaggtgttctcatggagattctgattcagtgcatctggagtgtcatctgggaatttgtgtgttcaagaaatagccaggtgattcttacattaggaaagttttagaatcactgcagagtgaatctgggaaatcaaagtgtttttgtttgtttgttttttgagagtattagagacaggttgctttggctagatcctgtggtcatttttcccccttggaaatgcctcctacttgctggcctcacttagtacagagaagaaagctgctatggtataaggttagtaaagttgttttgtcttaaaagaaatttgcgaaatccagcattttcagacttctgtttgtgttgtatgactttgttgtaagcctccttattcctccattagaatgttacctgagatgttagaatgcataggagttccacagcctttttggtgtccactaaagaattctgtcctcagccgttgcaaatggtgcttcctttgaggatttctgcttcattagctcatgaacacatatttggtgtcggcagtttccctcagatgtgttagtgtggagagatataaaggtcactcatttctggcagtcctgcttttggggtttctgggctgctgcagcaaatgaaataaggaaaggaaaataaaggaggaatctagggcttcttgagcagaacaaaacaatctgcaagaaggggcacaggattgctcctctcacaaagacacttgataatactgtccttgataggaagaaggaagtggcttcagatctgaaaggatatgctcataggcttgagacgggacaaactgcatcactggtagtggtaggaggtttgccgtagatctgttttttctcctgtctctcttttttgaggagaatattatctgtatggcagaacatacgttgtggtcttaaaaaggagagtaaagccaagaaagggggatgataaagccatagcttggaataagaaaagcaaaggaattattgtattaacttgtgtatgtaaatacataggtttccatgtaattcactggtaggatcactagcccttggcactaacatttgctatctttgtagctctgctgtcttagtggtgtattgggggagcattgtggtgtgttgtcacacttaatttgtgtgcttcccttggcatcatgtggtagcaagtacagggtattctcctcttctagatgtgtgggaatcattgaccaagtagaaaatatggtcctgctcccaaggagctgacatcatcatggagacaagacagataagcacacaattaggaatatgaaatacagttattttatcatttatctatgctctctgaaagcagtttcctgcagtcagggtgactcggagctatagggtcttgggagtaaacttcaggtcttaataccaccagggaaaggcgacctccagctcacccttgctgggcttgtctgctgtcgtgagctgtctgccattttcctctttctgtgttgtaatttagaagtattagaacttggcttggggaaaagacaaaaacccctttgtctggtgagggtgtaaatataaatttggcacatgttgtggtgtctattatgtctgttagtgggtttgcggcaagagagagtgctgtgttcttagtcccgaatgccaagcctgaactaggacaagttatggtggagatatcttccttggaagatgcagttctcagtggcagtggctgaaggaacttctcgtcacagccaggcagtgactgaagtgtggtgtggacacacccagagttgctgcctcaggtggcattgattaatcatactaatatctccctcacccttttgtacttgtcttggcaaaaccctgttctactagctccccaatagtttggcctttactaggtatgattgaacaagctcttgggggttcaccttagtgtcccttgcccctctcgcatttccagccagctacgtcgctccagccatggtaccccgggtcctctggccaggcagtgaggggctgggtttttcttcccattggactgaagcacctttccctggaggcttgcctagggcagtttctggtctccgagtcagttccttctgcaggatactggcagctggcagaactctgggttatttgaatacatcagccaaacatcttgccaagatggactcattgttgcataaagacaggttggatctatgggtgttgcagaacctgtttctgggttaagagtagctctctcacccttattatatatgtttattcatatgatgaatgtatgtgtgtattttgtgaagtaaggaaaacatgatgataatattgtggttggagttagataccttatcctaaatatgttgtctttttaacaaatagcattcctttaaaatacagttgtgcttgatgaataaggtgttgtacaagaagctgtggttacattctaaaataaactgccttgttctgaggcaggcacgttttaaaattgttgtttgcttctttttcatctctttttattttcatctttttttttgtgagaagattctgtaagtttttaagcttcaaatattttcaataatctattttaacgggtacctagcagggagaggttgttctattggtatacctaaccaacattcaaataagaataattgaatactgtttactcactaatctgttctgttgagtttctaagtatgaataatcacaaaactagatagtgctgatatatcaacttctctaaatggtaaatgtggtaagtagcaaagacatttttgtttaattctctccttacacatgctttggttcagacgctgtcaagacacattgaagtttgaggacatgtgtatttcgattattttattatatttttatttgctgtgaatatgggtttatttatttgctagatcttctttagttagaaacattaagggcatttactttattacaacatttaaagtgcattctaatcttcatgaggaattttaggtaaaagaccgtatcctgagattcatgcaagtctttggcattatgttactatttaaagtaagtaatatgtagtggcttctctgacatattctttctaagagagttaaggaaaatagttgtaactaaaaacaaacattgaaacagtttaaggtaggtttacgtagcaacagaattattcgttatgtttacagataattaactcgtatttatactttgctgattttctctggcacctttacaagatttttttatttttgtaaaataaaaagtaattatgtttgaaaaagtagttaaggatgtttgaagaatctagaaaagcataaataaaatgtccacaatcatgctgccattaattttttggtatacgtctttggtttttttacccttagatttagaaaagctgttgatttatttttatatatatatatatatatatttagtttatgaacagatctacatatatatatatgcacacacacataatatactattgtcaacactaggttttatttttaaaaatctttaccatttgataagtggtaaatattacttaatcttaatatgcctctctcattacagtgatattgaatgttttttcatatcatcagtggcgtttgtattgcctttttttctacttcttttggtaaattgtgtcttttactcatttaattattttcttactggtttgaaaaagctctttaaatattaagggtgttagtcttttgtcttaaatatgtcacaatatgtatggaaataattagcagtatataacataacatcaaattgctaccaatgttgatataaaaattgttcatttcataggttaatttttttaatcctttggtttctaatgatattggttaattcatttgttaactgctattttctgtagctacttgaaagttcttatctgactgtatcgtaaatcagcatgctttcagctgtatatgtctaggaaattgacatttactttaatacttaataaaaaaatatgttggagaaaagcagtgtattctggagtcaaatacatgattttgggtgggtgacgtaatcggctactgtcctccttttctagatagccaagatttttgaagcatttaacatccctgaaaggcaggactaatgctatgtctaccatgcactgctaattctgacactttgacctaatggataaatgccagtacagtgggtctagccagttagcttggtcagagaacaagatgactaagattctctccccctttcctcaccaaattgattagttgtaggacagaactgactgaagcaacctgttgttttggcaacccatggacaccacctgtttcttccattcctctgtccagcctctcactgccctagtgcagtgctgtgtgcacagtgggtaggagatcaatgttgttgctaaagaatgtagcaataaagaagagtagattgctttttttccaagcttttgtgtttttaaggcaccccgctggttttgacattcgttgctccagctgaactgctctatgctgaagccctgcaggtctcaagtgtttggttcagagtaatttcaggccatatgaatgctttcttaagtatcattggaatttactgggctggctgtctgccagctattaccatatttagcatgaagagacctggggaatgaggacatttctgatcaaccaaggaaggaaacctatttgaaggattacaatattttctttttttttttttttaatggtgtagttcagaaaacgccagttagaccgagactcaaatttatgtccactggtctttgtttctgtgccccatcccaaaattaatttatgaataggaaaagagatttgatagtgaagttctttctcactctgaagtctaatactgtttctgggaggaagtaagagaattattatgcccacactgtgcactgagaggcttaaccagcaggtgaagctgttgattaaaaacataggttgatgagtattctcatttttctcctttgaagctttcagaaattttctgctttgtcctggtctaaatttattttggcccagcccttgtctccaccctacatttcaaaccagtagccttccctctatggctcaacatttctctgcctcagttttttccattttaaagatgaagatattgtttggaaggaccagtaaatacaattaatataaaaattacttctgtagaatcaaacaacctccaacatttctgttggaaatttataatttatagagtattcttacacagtgatctcctttaatcctcacaaacttggtggaaatggagcctcacaggggttaggtgacttgtatacattgtttacccctacataataagtgacagagctggtacttaaacttgtggcttgatttttctttttttttgagttggagttttgctcttgttgcccaggctggagtgcaatggcgcaatcttggctcaccgcaacctccacctcccgggttcaagtgattctcctgcctcagcctcccgagtagctggaattacaggcatgcaccacaacgcctggctaattttttgtagttttagtagagacggggtttctctatgttgggcaggctggtctcgtactcctgacctcaggtgatccgcccgcctcagcctcccaaagtgctgggattacaggcgtgagccaccgtgcctggtccttgcagcttgattttttaaacatcagatttttttttcttttttgatttttattattatgtgtctatcattctgctaggggctttgcaaatattgctttatttaattcatatggctatcctttggagtagacaatatttttctacattataggtaaggaatttggaacttaggttcacagctttggatgttggcctatggttagtgaggggtgtagccaggattcaaacccctgtctggctctagggccgctgcaataaatcatggtgttttatgtacattcatacacttaacactttgcaacaaccctaagagacaggggtaggtatttagggaaactggggcttctaacttgcacaggataatgcagttagtaagtggcttagtcgagattcagagctagatctgtctccataaccctcactcattccaggatactgcagatgcctatttttatgatatgtataagtaaaaattaatttgaaaaactaccttctttgaagggtcagccagttagaactcttttgtatcttctgaataagtaagaagtggatggacattagctgaccgatacattgatggcttttaaccttctatcagttgatttccattaccaggacaagcaaatataatttggagggaaaagaggggagtttccattaaggatgaatctttaagccgaaaagggccacagtgatgaactcttcagaggactgctctcaggagcaatggcccttctcctctgggctctgcttggggcattcctgtttgtatttatggagacatctttttgaaaggcagataccagctttggtggggagaaggttggaaaacatacaagccttgctctaaatttactagccccgtgtctttgggctagtttctgaagcatggtgtgcctcaattttattattttaaaaataaagatagtagcagtatattttggagttgttatgaagataatatcagttaataaatgttagattcattggacagtaccaggcacatagttaaagtgcagtaaatagtagttattgttggtattggtgttattttatgttgtagtacagactggcttcttggtgcattcacttttctttaatcaaaagtggatgagtgattgggaaccttcatgaggaaataggaacatcatctttgcagcctgtggattgttcactggtttcctgtgatctaataattatttaagggtttcatatttgagtctcttcccttaatgaggtacactttcagtttggggagattttatctataggcataccttattttattgtgtgttcccttttattgtgcttcacagattttgttttattttttacaaattgaaagtttgtggcaaccctatgtcgagcaaatgtatcagcaccattttttccaatagcatatactcagtatatgtccctgtgtcagtattttttagcaataaagtatttttaaactcaggtatatgcattatgctttagacataatgctgttgcatgcttaatggactagagtatactgtaaacataacttttgtatgcactggggaaccaaaaaatttctgacttgcttcattgtactgtttgctttattgaggtgatctggagctgaagccacaatatcacaaaggtatgcttgtattatgcaaattgcattgataggtgttaaatcattttcccattttttattaaccacacatttgtgattggatgttatgtttagtaaagatattgtgattttctgaggtacagctttgagaacagtatcaggtctaacactcttgtttccaaatttcctatgatatgacaaacataatcacatgccatccagtgtcaccatgcagagtactaatgtgaagccaaaatacttggtgttttaattagccttaaagcagttaacgaactatctctgttagacattttgaaataataaaaatatcccattgtcttttattacaacctcaggggctcctggagattttgggatcttgtgtggggaaccacccatctaatccatccttgttttaaagagagaaaaccaaagaagcaaagtgactggcccaagtacctagagctgggtcagggttggggccagaatccaatctcttgacttttagtcaagtgatttttccactatgctcagtactcaaattatgtatcaatatgtcggcccttgttttttgaggtctgaaaagggttagtgccagtcaacaacagtagaggagtagaaagggtgttgggatgggagaggtgtggctatatttaaaatttcaatgacagcagtgaaaataatttgcctgtgaacctctgcctgtccctttggacttctttgtagtagttgagacaacccggcaggtctggtgtcattagtgattcagaattggattaacctggactggtggagttactttctcagaaaagggctttatattttaacatttgtttcccttgacagtttgcttcttctcaagttttggcagccttgaacaagggttgtcaggtttttattttgttttgttttaagaaaaaattccaaattttattttgccgatttagtaagttatcctctacctgccactcccttctgctccctctataattatttctaagactttatttttccattgtgggaacattatggaaggttttcttttacagtctgagatatttataattacgtgtaagcacacagtttatagaatatgtaaatggtccatatgttaacttaaatacccttaaaatattttccaataatttaaatctttccataaaagtagctgaagctgcttataataaaagagaagtatacacgaaggatagcagaatttggatgtagttaatatagataaatatgaatgtcactttggaggaactggaagtatttgcatgaatactgatcaagccatgcctccttgttaatagagtgaacaaaacagatgaatgtttctgttttcatgaagtttatgtgactatcagtagcttccatattctgagggtttattatgtgacagatgcttggggacaaaatactttacttgtttcctttagtccttaaaatagatgttaggattcttgtttacagaaaagttaaggaatgttcatccagatcacctagccagtcagtggtaaagaacagtcactggaacccctctttcctgatccaaagccaacatacttaaccataataaataataccattgtctggtggaatcctgtagtcccttagatagtgtaattttgtatttaatgtaaacattttgtgcactagactgacttacattttactttttaaaacaatattttaattctgaatgaacatttgcataataggagaatgatctaaattgcaaacttccattttgaagagttgtagttcttttaaatctttttgtaactgggaagaagaatggaattatgtttgttataatccaaggaaagttggttagcattctttcctgttactttttgatcccaaaagaaattctttagtagatcaagaccaggaatgaatgtgtggatttttttaaataaaaaattgagagagattgtaactagcaattcagagccagatttatgttcagaaatgtttgatgccagccgttttagttacaaataactttttcttgactgtacagttgtgttcttatggtaccattctgaaagtgatgtaagagaccatgtaaaatgattggaatgcctcagcatctgaacaatgcacatagccaattattaaaattacccagtactaacctgtcttggcttaggaactatggaattaactgtgggtagcatttctacacatatcattacagaacaagcataaagacaagcttgtttttttccttttctgtggatttgttttttcttattaccatatcttttgttactgaaaactggtggtcatctgtactaatagataagagaagtgtgtttgacaccaatacctaatcttagattatccctgctattttaaaacaccgtccttcacctgcatgctcagacatgtgggttctttcaaacatactggacttcctccttaggttttagttgtgttagttaatagttgaatgttgaaggagaggatgccaagggatattaaagaaggtaaaagagataagtgacagcaaacattatttatttttaattatctctcagaatgacttttagatacccttccctactacattttgatttttgctttagcatagctggtgagttttggaatcagagagactgggctctgatttgtactagctaagaatattagacaagccacttaacttctttaagtctcagtacccgtatttatataatgggaataatagtaatatctaacttgcaggattgtttgtaaagattgaaagcaacatatttaattgtgcttgcgtggttctgggcacagaataggcacccgagtgtaggggcccctgaactttaaagttcattactttcatggtaattcctcctttggaatatatagcctgggaacatttgtctctagaccttgtttcagtttcttttaatgactccttttaggctctgcttcatggccaacgcaagattatggatcacctaaagagtagactaaaagtactattgtctagtaacttcaagtttgtaggttaactcactgtgaatcaaaagcttttaaaaatcttttgcgtggtcatagtttgtagtgtcttgtacctctcatctcagaagcaattgattcatagaaaaaattatttaggatttcagattaaagatgaagaactcttccaataagaaggaactgatttggttggattatttgtttctttcacccctgagttttcatggaaatcaggtttaaaatgttagaagcagttggttttcagcattgggaaagcttatctgatcaggcatgcgaagtggcctatgtcggatttctgagctaggaaaggctaggggaggttgaggagattattgtacttgtaattcctgagcatggttgagacacaaggagaggattgtggaaattgtttttaaaaaattgttgaagttaatgcattcttgggtggatttgcaaaacagaacaaaacaaaaagttgttgaagttagttacactggtctaacaacgtatacttaccacccccatttgggctggaggaatggatctaataataatataggtgtttgtgatctaatttgaatcatgtaatcatttatcatttctgggttagatggtaaggattttctgtttcacagatttttagactgggaattgtgctattataaaataatattttacattaaataatgctttctaggttgtaatcaccttaatagacatgatttatttgggccacaaatgaactctggtaagaatggagggctggttacattattttagttttacagatgaaaataatcagtctcaaatagcttaagggaattcctttagaccatatggttagtatatggaaaagccagagctagaacccaggttctgatttccagagcagttcttatttcatgataccgcataattttataatgtccctaaatccgaatttcatttctcatgatgtgaaaggattctctttatttctgtttggttagctgcatcagagcatgacagaaatggagcagaattcgagtattctttccccagatgggtcagttagcttttcttaaagctattctgtgcttacattgttaatcagttgtccctggttcctagacaggatgttgatccatgtgaaataggcaggaatatgtgtctgactcagcttaactcatcacaactttcatatgtcctgctagtgggtctataatgtcaccctcgtttacaggcgtttttaattttctgatgtctatttcttagtatttttcctcagccatttttaatgtctcaagccatagttcttcctgagtggcctgaagtgattttgctgctctttaaagcttccttaaggtttttcaagagcgtacaacataggctgcttctaagtgtatttttatttcctagctcttagcatttctcaccttatcattataactttaaatttaaacagaatacaaattgtgtacacagatgggtgtgtcactattgcactgtcacttatgtaagtgcagtttagcatttcttctttccttttaatcaaaatgaggaaatagaaaatgttttgttatggtagttttacacatacacccacaaggaaatgtgtatctagagtctgtgggaactgtgacttgatacatttcagggaataaaatgtatgatggctaaaattttaactctgccaaatgttcacggggaaagaaaaattaacaaactcacattttacactttattttagcctagtctctgccttgtttacatctatatgataatgaagctatacttgtctttccacaacagtgtattttataagttgtaccttttgtttaagggagccttcttaacaaactttctttcagttgtccagtgtacagaagcttactggaaggagtggccaactagttaaaggtttgacacctcaatatcaacaaaatgccaagtggatcattttgactctcacagcaatccaactggacatttgaccatgccccgtggtcagtggagagcttcttctctgaaggccacttttatctagcacatcaaggctatacacctctttcactaagaagaatttggcacttttatgttgtgagagctgagattcaccattctccaccatcctgagaagagctttgatagaagggctactcctgaggtacatagattatccaaaatacatacaattttttcatagaaaattatatatgtattataatttttattcaagacaggttgaaattaatagatttcttacattcactgcattaaaggaatatttatggctttggtaatattttaaatttcaaattaaaaaatttgaatatctgaattaagtatctctgatttaactctgtgtgtgtgtgcgtgtgtgtgtgtgtgtgtgtgtgtgtgtgtgtgtgtgttgggaggaggaatagaccttggaattgttttttcaaaactttttttataatagtgcctaatctcagttggcaaggaatagctgtccagaatgctgcatagatctagtgaaaagatttagggaagttgtaactagtttaataaccatctgtggagtgacatagattgacacacccaattacacaagacctgagtctgagaactgttgatgtgcaatcatcccatcagcatctgctcgtcattatcaacaacaataatggctcaactatttctttgaggccacatgaaaagacagtgtacccatagcaaaggataagtcagacctgaaaaaaacatagccctctgcatccccttgttcccaaacttctttttaaacataaccttttgtgaagttctgaaagaattcattttatgttttctttttattaatttttcttcttaaataccatgtctttctggctgaaatccttgccaaaaccaggaagggccagtgtactgtgggtgatttttctaattcatttctttgtcatttgaagccttctgtggcttcatgctgctttatgtgtgtgtaaatattcagtatcttttctagtttacacttttgtcacaactgctattaagccacctatggacacattctaatataaattattttggccactgtgagtgggagggaaagaatcagttcacagggataaatttgcatgttgagaagataatatataatagtttgcaaaacacttctatgtacattgtatcttttatagagacaaggccatgtttttatttgtagagactgagacagagaccccatgagatctaatgcagagtcacatgactccaaagccaggtcttctatctgctctttggtatataactggatcattattctattgacagaaataaggaatcttcttatttttcaaaggcacccttttgcccttggaaggtatatttagaaatcctttaccagagtagaaagaagacagttatattttcctgccttttgataaaaaacagtgtgttttttctaaatcttgttgtgtttgactagagtctgattaaggtaccttttgggaaattaaggttctatagaaattactgggctcaatctagtgatacaaatatgtgttgtttgatttatcaacacattacaaaccttaactttggagttttaatatctggttatctttaatatctggttatcttctttctgaagtgtatgtacacaaaattgatgctaaataaggtcttgttgttttggcaaatagtgaaatgcaaggtattggtagatcagtactgttataactttggtgcaaagttgctgcatgcagattggctgtgggaccttgttcattttttgagaactaatgtagagtttgaaaaaacaccgtaagcctgcattccagaagttctggtatggatagtgtgagcccagggaatgtgcttagataaaagatcatttaacaaataggttttgcatttttttagcaatcaggctttgtgctgaatattagagtggttgtttcagagagtttgcagcaattaggctttattggtgcactaaggagaagcagagaggagaagcaattcttggtaacttccttggaagttgcagctaactctgaaaagtctgggttgaactaggtaagtaactaattcctagaatcaataaactttgcaggagtccgtttgattgtacatgtagctccctggaattgctattggtccctaaatcatcagtttgtaatgctggttttcaaacttgagtgcacatcaagttttggaggacttgttagaatacagattgctgggctcacccccagagtttctgatctggtaggtctggagcgggacctggtagattgcatttctaaaaagcgtccaggtaatactgctgctgtttgggaaagtacactttgagagtcactggcttacaacaatctcaaggtgtttggatttttgggcaggggtgctgtgcaggcgttgctgggatctcttcacagcacctccactgcatagaggtgagcctccagatgttttcattcattcaacaaatatatgtacctattgtgtgctgggcactgcttaagttgcgaggggatattgtgaagaaagtaagcaaaacccctttgtttgtagaatttcagtgagcatagtcctgggttaacctgacaacagtcctactgtttattgatgcttataggtgagcctatttctctttctagctttcttccacttaatttactttcttttggaattcttgaatttaataataataatattgatgttattagtcatcactataactttttattgagtgtgtattttatgtcagacacagtgtggctaagtgctttacatacattatctcatctaatccttagaaaaaaccctggtgtattagtcttaatttaaaagatgtactttggaaaggttagtagtttacccaagattatgcagctagttaaaagtggtgctggggctgggcttggtggctcacacctgtaatcgcagtgctttgggagtctgaggcaggaggatcgcttgacaccaggagtttgagactaacctgggaaacatagcaagaccccatctttacgaaaataaaaaaattagccaggagtgggggtgcacacctgtggtcccagctacttgggaggctgaggcaggaggattgcttgagccccagaggttgaggctgcagtgagccatgattatgccactgcacatctgtctgggtgacagagcaagatcctgtctccaaaaaaaaaaaaaaaaaaagtggtattgggcctgtctaattgccaagccacattctttactgcatgctttagtccattgttttttacactgcagatcatgaccacgaatgggtcatgaaaccaatttggtaggtctccaacagcactttgggggaaaaaagggtagaatagagagtatcacatagtatggacaagcattgtttcttgaaatttttgtttttgctatgcacgtatatatgtgaatattgaggtctggtacaagatatatttctcactgtaggtcacagtaaaacatgttggtaagctactattttcttggctatgggactatatgtcatctaatcactttttaaaaacagattacaaactgtaggccttagaaaggtaagtaatttttcagctgggcatggtggctcatgcctgttaatcccagaactttgggaggccaaggcaggcggatcacgagatcaggagttcaagaccagcctggccaatgtggcaaaaccccgtctctacggaaaaaaatgcaaaaattagctggacatggtggcgtgcacctgtaatcccagctactcaggaggctgaggcaggagaatcgcttgaacctgggaggcggaggctgccatgagctgagatcacgccattgcactccaacctgggcaatagagagagactgcatctcaaaaaaaaaaaaaaaaaccaaggtaaagtaatttttcaagagcacaaaaatagtcagtggcagtacaaagacaagatgactgactttttttttttttttgagacagggcctcactctgtcacccagactggagggcagtggtgcgatgttggcttaccacaacctccacctcccaggctcaagcgattctcctgccttagcctcccgagtagccgggattactggggtgtgccactaccacccggctaatttttttgtatttttagtagagacgtggtttcaccatgttggccaggctggttttgaactgctgacctcaaatgatccacctgcctcagcctcccagagtgctgggattacaggtgttagccactgtgccaggccagatgtctgactttttagcccttggtccattgctttattcttcacaccataccacttccttagaagtgcacctgggaatgcctgggaattgaattttatctttccacatgatggcagatatgctatggaaccttcagggatgtcgatgaaacctgaaaagggaagttgaatctcagcctgctctgagtaggtgaaaattctgccttggatcccccaaagtctgcagataaagatgtgacatttctcgtgttctgctgtgcttgaaggaaagagggtaataatcttaacagtgccaagctgtaagcatgttgcatatattaacttgtttaattactaattattttgatacagcggccatgcctgggatatgaactcagctgttttgagtgagaaggggcatcctaccagtgtgagttaacacttctctgtactctccccggttcctcattttgttcctgctgagttcagagcgatgttcctcatagcctggcttacctgtggatgttctcagcctcattttcttttgctagatcatatatcttcattaggtgggtgattttggtttctgttactttttccttaatattagtatattgctgatttggatcaggggccaggctgtagattttcagcatggtgaggtgataatacatgttggtcccccatgcagaatgctgcctctagcactttagccaaaggagctctacagtctgtccagaagtactgggggacactggtaataacctgagaacacttacagagccttccagaaagtgccctttcacatcatataaacagatcatgggaagctgagggaatgcaaagtcaaggcctcattggagagcggaaaggaggctgagattggtggagaggagtggctgttacattctaattagaagaatgacatgtgcagggccatgaagcaactaaagatgggatgaaaaacttaacttgtgaatcgcaaaatttgagtaggaaggagctggaaaggcctggaagtgcgaagtgattggcccttggtcagatggctagaagatagagagccaggcatagaacccagaatccaggccatcattttgtggcctcttttatcctaatgacatgttagccagaggtgtcttccaaagcacctgattatagggaagaatgaatgtcacttaccctagagtgagtgaaatagagatgccaggaagatataccaggtttatccagtttctttgcatttttctggcatactgtatactcttgagcgcatatgtatcctactttgtgaaatctgggggtaaagcaggacccttcaaacccttaaaaaatgtataccccaagaaaaacatttttaaagcatgaacgcttcctcaagtaaatacatatttatacattatataaatgtctggctattaaaccatgtatgcatatgttaactctaagtaaagcttatatgttttttagcccataaatatggagatgttttaaaatttcttccagtgccccagtggatggtcttacacctcccctgcttctggggtacacacacctaattttgcagaccactggtccagaatgtaaattgaagagtttaatgtctaagatatttgttcttttgtttgtagcttatcttttactccccacgtttcaaatatccctttgcaaaataatttttgagttaaaattttcaattaaaaaactgtatacttgaggtagaaaagataaagatagaagatatatgtgaattaggttgtatctctccttaagagggaatactgttttttatctaaggagaactaacaaccctccctttcattgtctgggttggtataagtaaaaatccttgtttgaagttattaagccttcccacccatatgatgattagtttggttcataagctagagttagggcttggtaaaggctcctttttttttttttttttaaagtctttccaccttaactagcaagtaagctagaaatgacagagcagtagaagggggaatctaccagagtgtcctacaggaccttgttgaatgctactgctgcatgcaagggttgtggatttggtgtgggccttctgcagtatcacccaaatttgagcagtacatgtaactaaaagtaagaaaaataaattagacagtttatttcatttcagactttggaagcccaggactgtggggattagctattagctaagacaatgattcactgagcaaatgcagtgaaagattcttttgttacactgatcatcatttgtggagagactctgaagaaggataaagctctggctgcatagtcaaaccagacctactactcaaggacatgcatactagatatgtaggtgtttccaaatatttttttcagttgtggcggtgcaaatcatttcaatagtagagtaactcagttcattactgttactggaaaaacaagtttaaccaagcacatatcctactgagggtgagtcaacagtgtcattttaacataagaaggacagtacatgaagtgagttattccaagtcctgtggttttcctacagctgagcaaagacagctgttctttcggaagtggggctctaaaaagaagttgcccatctcctttctttcttgattatagccttttagttttcttttggcctgagacatttcaaaaattcatttcctccttagatttctatcaccaaataccctgaattttgataatttatttatagagtatattatttattatagacttattatagtttaaaactttattttaatttatctcccatttcaagatccacatttgctatatgtgtcagataataaaaatgccataaggaaaacagaggagtgatcttttttaatatgtcattattttctatagttctttagtggtatggacatggaataaggtggcattttgtgggacagtataccaaacttagtgataaaatttatacttttaattttggaggacaaaagtcttgtattctcagccttgtggataagacagtgctctgagctgtctgaggtttcctaaattgggattcaacatcatgaagggtatgtgtctggatagtttatttgttggtttgggaaggtgagtttttgtcttttttccccctctgagttgatttctttagttggagagaagcagaccagatgaagaaaatactttatctcttatggcatttttggtttaccacattagttatgacccgtcttctctgagcagcaggccatgcttctctgttcagtagttcagttttcactaacttaactgcagatgtgttcttggagggatttatttctaatcaattgaattatgggtacttggataaaatgatgatgggttacctacttttaatagggccttcatttttaagagtaaaatcttgtcaagatagggtatatcatacttatgatctggttccatctctaactccataatttccttttgctcctgtgttgctactctattattgagaagagatggtatcttgtcagtgtcaattttacaaagaaaaaattctaaacaatttcagtcatagggtagttttttttttttcctggagaaataatgcatagtgtagtatgttgaatcctagagttggcaagttttcaaaagtggggttcttttgttgtgtaggtaggggtgatgctagtcaatgggtgttagtcattagggcatgtgtatgagtggtagttctgagatacagcattggcagcccctcttgtccctggttttgtttttgataagcaagtcctggttttgttttaataagcaggtcattagctgatctttcgtgtaaatgtttttgatgtgcatagctggtatgtgggtggttacccacctgagaatgttgtagtcacaaatgtatattatggaagtttgcagattatggtggatatcaggtttttctaactgcgtatttacagatgtagtgagtgaaaggaatgttgggtcagtaggtaaaagacttgcgctctggtcctggttcagacatcttgatttgtgtgactttgggcaaggcccttatttctttgagttgcagtttcttgtgtaaaatggtgctaataccaatttacatgcctcatagtgttgttgtggggatcaaatgagatcactgtttatgagcagccttctcaggagtgagaaatagagggttgtgagctgactttctgatttgtttggctgaggtgttcacacaagccatagaatgctttgtagacttgggtggaggaatgtagatggaaatcagctgaaaatccctgcctattagaagctgagatgttaatcctaaatatattgtatggagtactatcagatgccttgcttttcttcatgatgccctattagcttcatcttcaggtagcataggtgcctgttactctcattttacttgaagaaactgaccagccaactgatttaggatatggctggctatcttctggaactcacattagagttactccttgagagtaaagtcttgtattttctgaaggttgctgcttttggggtattttccgtggaggtgggtgggcacacacaaaaactcactgtgctcaaatttataaacttgttcttcttaacaattttaaagccagattacattggattgggggaggggaggatactagatttatttagtgttttttaatgtaaaactttgtatttgaaactttatgtggtaacatatatttaggctcatagccaaagtgattacaatgcattggttttaatattttcagtgaggtaatgtgtgctttagtggggaggaggagaaatattatttaatcaccaacactacactaataaccacatttactaaatcctttgtccctttgcttgaactgagggttccttgcttttatactggttttccaaaggacttcatcttgttaatgtgatgaggtgatgatgggaaggacattcccactgggcccgaagtggtgaaactggtaaaactccctttgtaagtccctcttgttcaacatgagtgtcactcccatgtccctaaagtagaatggagttttattgaagagagaattttaagagtgataaacaaaagagatggaaatatctcctgtgccaggtcattgttaccattaaagactagaataaactgtaattttgcagattttctttttgtcttatgggaaattaaagacttggttatcctctctcggaggaagatagaaaactactgggcctgctcattaacagtttagcttggctgacatttttcaagcacttaccatggtattatagctgggctgaagctaggtggagcagacctcacttaggtgttgcctagctccagaatctgtcttctggtggaattcccttaggcttccagacaggagtggcaacaaagcagatgaaatggaaggtaggccagggcatctgctcgttcgctcgctcgcttgctctttctctctttcccttttctttcctttcctttcctttcctttctctctctcctttctttcttttgcttccttcctctctctttccctttcccttcctctctctcttttctttttttctttcttttttttcttttcttttctttcttttctctctctctctttctttagcagtttattactcatttgtgagaatcagggaagcactgggctcaagaaagccaataccccttctagggcttaccccccattttaaaatttaatatattggaatttatattgtttcttttgatccgagatcttcaggctgaagctggagagaaatcttttgacctctctagaacaaagaaagcctttatcaaagacagtgtaactttttgagtttgccaaattaggtgttgctgcaaatggagaaacctagagttctcttctgtgcttaaagacacaaacatggaaagttttaagttccaatatggtcacttaatatatacaaaattttctgtctttgctgtctttgtcattccagcaacaactggatgagcaaatagaatgattgtgagcacttgcaaaccaaattgtgactgttagtgtgttgagctgcttttttattaaaatgactgctacaactctgcagaaatctgagtagtcttgaagataaattcttgcttgcatttacaataaagaaagaatatgagtaatcaaaaggctgatggagttggaggactggcgtttttaagaggaactgatttggacattgagattatcagctcctcatcaaatatcattaagtacacattattatttttttctgttgaccaggagacccaagttgtgttgatgtgggacatagctgtatgtctgaagaaacaaagcaagggagaataaaataaataaaaattgaagttcaggaatatatatatatatatatatatattttttttttttttttttttttttttttgcaggcagagtcttgctctgtcgcccaggctggagtgcagtggcacaatctcggctcattgcaagctccgcctcccgggttcattccattctcctgcctcagactccctagtagctgggactacaggcacccgccaccatgcccagctaattttttttttgtatttttagtagagatgtggtttcaccgtgttagccaggatggtctcgatctcctgacctcgtgatccgcccacctcggcctcccaaagtgctgggattaaagacatgagccaccgcgcctggccgtttagggctatattttatgttttcttctccctttggtatttaataaagatttgatatttttctattatctgctttcctctgttccaaggtttttggcctcaggtgtgttctctggaaatggcaatgataggcatttataatctccatatttagatatttccctcacagtgctagtttctgagcttattagaacctaatgttaaatgacgagttaatgggtgcagcacaccaacatggcacatgtatacatatgtaacaaacctgcacgttgtgcacatgtaccctaaaacttaaagtataataataaaataaaagaaatatcctggctatgagtcaagggtttaggaccttttgaggcacttgggtttagacaattctcagtgatgtgtacaggaatttgggtacaggaatactattcacaggtgaacagagtttgattttggctgaaggcatattatttgatccagataataatataaaaataatccaaatgttaggaccttagcttctgcgaaccctgacttgagaatagttagccatacatgtagttggactttatgtaggactaaccaatctcctctgcactatttttgcacagtacattgattatggtatccctgatgacctctgtccccatccttgtgagtagccttcattgctaccacccaaggatgttttaaaaaggctatgaggaaggatgcatgtagggaaatctgaggttgttctttggattttccctgttttgttttaggaagtatccatgattttatataataatatgtagcaatcttaggtttttccattttcatttttaacataattttgttattcattctgtttgggtgtctacctctaaattaacaaacatgagaaattgtgtactccatttaaaaagtgtcctgagcaatttaagctaaaagaatatgttgtttcttttgggtgtatagcaagaagattatatatatttataaatttttttccagcaagtgtacttaaaagcgtgtacttaaaattaaggacttaaaaaaactaagctgtacttaacaaaataatctttagaaagctttaaggccgggcgcggtggctcacgcctgtaatcccagcatcacgaggtcaggagatccagaccatcctggctaacacggtgaaaccctgtctctactaaaaatacaaaaaaaattagccggatgtggtggcgggcacctatagtcccagctactcgggaggctgaggcaggagaatggcgtgaacccaggaggaggagcttgcagtgagctgagattgcgccactgcactccagcctgggcgacagagcgagactccatctcaaaaaaaaaaaaaaaaagctttaaaaagggagttttctaaaagcacaggaaattggtgacaggcaaaatttgtcttgataatagtacaaatacagatagtggaacagaacagataatacaagatataagacaagacatggaataacacttcatattcactttctttgaccactaagcagcacacaaatatatagcagtttttgtagagaataattaaatttctagatatgatacagcttcttcctctctgttgggttttattacactgagatcctgaaccttttggacatgtaaactgtgatcatgttggtcagtgtcatttggatctcgttggtgcttattgttctgccgatgtgtattagtgaacctactcatggggaagataatactatacaatgaattttcccattcagttggaatttttttattactctgttttctgtttttcatttagatgtaaattattttggcttccattcaacctatttcagctagtttttaccataatacacatggcttaagatttataggaggctaagagtggagagtgtatcttcattcaaacaaatggtaagaaaggaactttcaaaactgtttcagttttgcaaagattagaaaagtacaattctactttctcaacttttcatccttgttaaaggcctggaaatttgcagcattttgttctttcttattttacttttctaatttgttacacaaagtgaaattccacacataaacatgcaagctgaaggttgggtttattcttaggttttgtcttaattatagatatttagtttattgaatatcttattgagtattgagtacctgctgtggtccaggcatcttcttaggtcccaggtgtacaaagaggagccaattgtggttactgcctctatggaatttgcctagaagtgggagagagagagatgagtgagccagcacttataatacatctacttaggataaaatgggagcacagaagaggaacatctgtatcagtgggtctctgagagcttcttcaggaaaataatgctttatctgtgatttgaaatatagtaggaatttagcaagatagagaaaaaggaaaaggaggtaaaatatttttcaggtaaaagaatgtacatgggtatagaggtgatcattattagcaaattggctacatcctaatttgtaagtatttgtggatttttcaaaccttatatttcatgtagaagagctgaatacattagtctcatctccaagatccaggtattgaaatttaacccatgcataaattgaatttttttctgaagtctttaataagagaaaaataaaaggaaaaactacacagtatatagtagatttcaatatagcacagcaaacactgatgaattttttttgcaataagttcaatattataaaatagaacaaaattggaatttttaaaaccaaaaattattctagatttatcagctaactggaatgatttttttatagtatgaaaagtctgttagtaatacaaaaaatattcatttataagttgttatcattgattatattttcttaaggtatattttcagtttttgaaaagcagtaataatttgctatgaccctatagcccagttcttaatatctggatctgatactagcatctcttaggtagaaaacacactttctatatgataatatctgtaaagagcacataaatccttggaacactattaggaaaacaaaatcgatttatctcttattgcttttttttgtttttttttttccttttaatcaagacaaatttcaaggaggaagacagatgtttctccacttcatttttatttaaatgtaccacttgggatttgaagcttccgcacttcttctgtttgtttggatttttttttcatggcttgatcccaaaaaatggaatacaaaatttagagaaagttttgtttgaaattgcagggcgctatgagaattattgcaaatccctgatgtctccttgtctgccctcaattctcctatttttggtaataatgcaggcagtcattttagaaaactttgctttgttcattttactgagcctcttccagaggccatgtgccagaatcaacagcagccaaccacagccaagatcctagggcgtaaactcagacttcatctctcaaatattgctacttgaaatttgcataaacattgaagaaaaagttaaaagagcctgtataactcctcttcatgtattttaggagcctcagacagtcaagacgttaaaataccttccgattgagcagtgggtctaagcacagataccacactgcacatagggagaaggatatgaaaaaaatcatgtgagatagacgacagaggcttatttgaagaagctacaaagcaacaagtaatgccagtttaaaacgattacatgttaatgcaacaagtaaaacacattgaaggctgctcagattacactggctgaagtacagacttaattactcatgttagagattcctaaaacaaagggaggcttttaagccagtgatatgtagctggtatgatagtgaaaagcattggaaaacttaggtaaatgcctagaggaaattttaaggaagattccatcaagtctggataccttagccttatccttaaatgaataaatttctgaggcgctggaactggttaaaatcaatggcagcttattctgttgtttgcagtttttatgtacaattggggctgataaacctgaataaataaaagagccttgtctggattgagttacagttagtgctaaacatcaagggttcatattgtatttcttaaaagttctttttggagtgattccaagattggtattaagagggtatgccaagggtatatattggcaatttttattttgtttgtatttatcttagagtcatttgggtaggtcacattctctctgcccctactcccaacttctcattagattgtaaggaccatgaggacagagattgtttgttttatttgtgcttaattttcatgcagtgcctagtaggggacaatgctgacagtagtttctcgacaaatattagtggaactgtattaaaattgagtttttgctcacatatattgtttattttacctttagtggatcacttctccttatgccttcagtgctatagttttttaaaagaagtatgttagtctgttttgcattgctctaaaggaatacctgaggctgaataatttataaagaaaaaaggtttatttggctaatagctttgcagattgtacaagaagtttagagccaacatctgcttctggtgagggcccaaaaaactttcatggctgaaggtgaagagggagcaggtatgtaacatggcaagagaggagggagcaagagagatgtcagtctctttcaaacaaccagctcacatggtagcgagaattcactcattactgtgggtgggcaccaagctattcatgagagatctgcccccataacctgaacacctcccagtaggccccaccttcaacattggggattacgtttcaacgtgagatttggaagggacaaaatagccaaactatatcaagcacaaagaagatacagagatagtcaatggtggagctagtattcaaacccagatttgtctgatttctgcatccgtgctttcaactgcttaactgcattgcttcaaatactcagaaaagacgaaatgttttccatatcccaggaacttaaaagtgaaaaagcagagagctagaagaccatgtagtgctgaattgagagtcatgagtgttacaaggatagggggtggtggccctgtgaggaccagaaccctccaggggaagctttctgggtgaggcaagaggtgaactgggccttgaaggaatgggtagaatttagatagtaatgaggaaggcagaaatcagtggaagcacagacatgcatggaggaatggaactgagttcaatgacgatctgttcagtaaagagggcataaactgggcagagaatgcagtggaagtggtggggagtaatactgggcaggtaaggtaagctctgatctggaaggccagcatgggagcctagactcgttaaagtaagaaatggcttgtccttggaagaaaaagtgtcaaacttggtactgtgtgaaggtactgcacagacctcccaactggttcttaagagagccaaactgaggctaagttctgagaactaagtaagaactgacagcccttgtaggttagaaagtagtggggcaacatgttacaagtagtgcttctggaaggttagatgcggttagaataaaatcattgccattttggggagctgggaaaatggatgtcttcagtctagtctaaaaagggatgacttgaataagcttatataagaaagaaaagaaaaacctttttactcactggaccatttcataatcttgacttttttcaaacataaatctgtgtcatttttcttatttaaaacagctgagtagtttactctcctacttagagctgtgattcttatcatgggctcttgtgatctaaccccagcctgcctccctggcctctgtccttgcttaataacctctagccatatgaacctggaataccagtctaattcccacttcaaggcttttacacttgttgtttcctctgcctggggtgctcttccctcatatcttcatgacacttgttcatttacattgtagctcaaagcatacctcctcagggaggcctttcctagacactatctgaggtacactcctgcacccccagccttcatgattgctttttatacattactgggttttgtttccaatggaacttatcgcttattactgtcctaaattattttatttattaattttttagccacctttctcttatagaaataaggttcctgaggacagggagtttattctgtatactacggtatccctgacatcagggcttgtgcctgccgatagtagatgctttctaaatatgttctgaatattagatagctagttcccaaatgcactgcactgaaagtgtatgaaaattggaaattggcttctagatttttgtattatattgccaaatgatggagtgatgagattgaaatctactacttctttttgcttttttttttttttttttttttggtggagtagaggagggcctgcacaaacagcagatacacacacagtaaataagatttatttcagccagcaaatatttattgacatgaaaattggggttaaatgtgactctttgtgagtgactagtttcttggagtctattaaagcatcagtttaaacatcaattctctatggtatgattaatgtttctttttttactttataagcatgaagctgccttcaattttattgttaaatttaagtgttttacattggaaaaaagtaaattgaattttgaaatgaggtctgtcccggtctcactttcatggcttcaggttatcaaagttttaatttctctttgtatggaagataattatagtattcatttttgctcctgagtaaagccacgagtctcaagattatttttcttttttaaaaattagaattgtcaatttatagttgtatacatttatagggtacaaagtgatgttataatttgctaatacaatgtagaacaattaaaaggtagttagtgtatccttcatctcaaatatttaacattttttgaaatttactctcttagcaattttgaaatgtacaataccctattattaactatattcaccactctatgcaatatatctcaaacatatacaaaaaaattcttcttgtgtaactgtagctttttgtacccattgatcatcaggcccacagcttccgtaaccaccattttcctctctgcttctatgattttgatggttttcaattctacatataagtgagaacatgctgtatttgtcttcctgtgccttatttcacttagcataatgttctccaattctatccatgttgtctcaaatgacagaatttatatctaaaggttgaatagtattccattgtatatatctaccacagcttttttttttttttttttttttttttttttttgagatggagtctctctctgtcactcaggctggagtgcagtggagcaatctcggctcactgcaacctccgccccccaggttcaagtgattctcctgcctcagcctcctgagtagctgcgattactggcgtgctgtaatttttgtacttttagtagagatggggtttcatcatcttggccaggctggtcttgaactcctgacctcgtgatccacccacctcagccgcccaaagtgctgggattataggcgtgagccactgtgcccagcctatctaccaccttttatttatccattcatctgttgatggacacttccataacttggtatgggtgtacagacatcatttcaataaactgatttaaaatatttggggtaaatacgcagcagtgggattaccagatcatgtggtgattctattttcagttttttgaggaacgtctgcactgtttttcacaatggttgtactaatttacattcccattaacagagtagaagggttccatttctccacatcctgtttattcagacaatatgttatcatctaaatcatctaagacctctatattatatagcttttgagtatttttaaaagtggacactcaagcgttcatatagtcatagtcagtgtgtggttcctcagacctgtggtatcaacatcacctgggaatttgttaggaatgcagattcccaggctccctgcggacttagtcagaaattgtgggggtcgagtctaacactcttttttaaaaagccctccaagtgattccaatgcttactaaagtttgagaaccgtggctcagtaaatgctaaaggttcaaggtagcatgatcccacacatcagccaagtggcattaattattagcctggtaagcccaccttcttttcagtcactgagtttgattggttcactagggctaggctgtaaagttatttgctagattgattgctacatattgactttgggttatttgtatttctctgaacctgtcactgtaatgatttgtcaggacacttaataggaacaggccgtgatttttgcacccatggcattctgagtcatgggtggctgggtcattatgtactccaggtttcttcaggcactgggcatgccattcatgtacttataaggagggagctgtcgctggtggatcacagggaaccttcagggacatttagttcgctctcagcttggtacaggtagggaaattgagcccccatgaagttgtgctttgcttgcagttaggggtacagacaggatttcaggtctcctgagtccctccactgcaccaggattcctgcagggggacagagctacagctttttctgtgcctacaggacattcctttcctactgtgagggttttatttatttattattttatttaaagaaaaaaagtaaatagaaaaaaccccggaagttctcactgaaactaataaaagtgtctaaagagaatgaaaaaatcagtttgagaactttggtatggaggaaataacctgacattaactgttttaattatagttgttgcattgggcttatcagtgtgggaagagggagcatttgagccttacagggaagtgggatatggacaacaagatgaccctcttcctgaatttgcctgtttgggcctgcagcctggtgactctttgtgtgatcccaacagctgtcatagagatgggttggacttttactgagacctgggtcctaggcccagcactgccaccagctagtggcgcaatgccccataaagaggccacttattctctctggcctctactattggtaaatgggtataataatatccacgctgccaatcctgagaaatttcaggtagtgggaagcagtgtatcttggtggttaagggcagagtctctggattcaaattctggctttctaactcactggcatggcagtaggcaggccacttatcctccctgttttctcacctgagagtgggtataatgaaatttacttctaagggttgttgtgaagattgaattagttagctaatttatgtaaagtacttaggatagtgcctggtatttagtaagttctatgtgttagcctattattattattactattaccatttaaaaatattatttcaaggatgggatgcattttctgtaaacatgttctcaaatgattctactactggatacaatactgggcttttatgcagtaattgttgttggaggagttgttctgacatccagcttgcacctgggctactggtttcgtggccagggatggccaggcctagcgtctctctgatcttgcacaatttatgcatagagtggtgtggttagaggaaacttggagagggggaacttctcagttttgctttcaggtatttatacattaactatcataagagatggacatcttaataacttccaagaaagagttcatgagcttcaatttgatatttattgtttgactaggtttctttctgtcttacctttccagttgttagggttcttgatatgtattttggtgatgaaaatttcaactctaaaagctaaacaatcaagatattgtaattatccagcaagtgattggcagatttcgagtagacttcttccattcttggctgaaatcaatgaaaatgtctactattgctgttgtttttgttcttttctctgaaaagtctgtttttgggagggcctcagatggtaaagtgcctttttattgtctcttaaagggaatgggggaatcaacagtttgagaatttttgttttatctgtatgtataaaattgccttctccttttatttcttttgatactctctctgcagtctctattcatgatctactccccatctttttatgggccccttaaagctagagattatgtttattcgtttatttatgtattccatttctccttttttctggatcctaattttgtgcctggtgcatactaggctctcaattttagtttgtcgaattactgttattgctgtttctgattacttcttgaagcggtctgttttaaaacttcacctgaaggctaagtaattcatcagtataatggtgatctattatttatctagcattttcctaaacactcattgatgaatccttataatactcatctgaagtatctaaatcccaagatgatgtgtcatgccatagatggtatggctttaatttttaattgggagatggagatgtaacagctggagatactaaaacacagagaaataagagcatcattcaagaccacaaacgtggttattgttggaagatagttttgggatgggcttctgtgctagaagccagaacataaaaaactgattaaaactctaaaaagaaacccagattaggtgggaatgaatgctgatctggattggattacacttctttggtgtctgagggttatgattagtgacttacttctaatgtgcatttgtttttatttttagcattgcagtgtcgagatggctatgaaccctgtgtaaatgaaggaatgtgtgttacctaccacaatggcacaggatactgcaagtaagtttttctcttcatatattttctttttgcgatagaacactggacaagatttgattctactcctctatttttaatgcttctgtggaatgttactggttcttgagctttcctggtacagattttggttgggggtgaggatggaaggatgtggatgccagataattggctaataagaacttcttactatcttactgttatctttctcactatgaaaaagacttttcagtgagtggctagttaatgtatatggggtagaccaggcatggtggctcatgctggtaatcccagcacttcaggaggctgtgttgggcgaatcacgaggtcaggagttcaagatcagcctggccaacatagtgaaaccctatctctactaaaaatacaaaaattagccaggtgtggtggcgcatgactggagtcccagctactcgggaggctgaggcaggagagtgacttgaacccaggaggcggaggttgcagtgagctgacaccacatcattgcactctagcctgggtgacagagcaagactccatctcaaaaagaaataaaaaaaaatataaaaaaatatatattagattcccttgtgtttttcagattaaggcatactcttagagtctccccttaacatgttacctattatcttgtttttaagtaaaaccaaatagatatcaactttaatattcggcccagtatatgtgaatattatattcatatttttttctagtgtaaaaaatctaattctgaaagtgagacagtgagagaggaagatgtgtgcatgtgtgtagattgagggggagcaggggctttgggtgtgtattattatatggggataaaagagtaaggatgaaggaaaatgtaggctagttcttggcttaagagcatttttttttcctttttctccaaccatctactctagccaagacgttttgtttgtttgaggaaggctgtgagataatttcataatagcttttctaggtttcctgcaaataatttttttttcttctgcctcaattgaaaatttttaagaggaatatgtatccattctttttatttcagggaagatgctggagaaataaaatttggtaatatgaaatttctcttcttttccttcatttttgtgaggagtagttgttctttgctttggtggaggtacttgcttagtaagcattttaagtgagtttatccaacacatttttatttcttaccaggaatgtaattacaacttttttccagtgagatctgttctgacaccaggatttagttttttaatgttataaacaagattttttttttcaagtcagaaataattttcttcactaaagtgaaaatattttaagctgtgatgacagtaaagcttaacaataggttgtttggattggaataaagataacattggaaataaaggttttatgtagcttattatgggctgctcatttagtttttctagctgggggaaaaaaaaacgtggtgcattctcctctaagaatggagatacaactggagataataagggagggaacttaataccttagagtaggccactgaaatcttgtttagtctttttgtggcatttggtgccttagttgcttgctttattctgttatgcaactcttgtggtagttaaccccattgcattatggtcatttgttgatgtgtttcttttgctagaatgtgaggtcttagtcttatgcattttttgcatagttaatgcctagtacagtgcctggtgtagttattgttcagcaatgtgtttcttaaactaaaaggtgctaagtagataccatcatgcacatgtttcttatctatttatgttaaataagaagacactggttctctcctttaaaaatttcagtgtggcgattcctcaaggatctagaaccagaaataccatttggcccagcaatcccattactgagtatatacccaaaggattataaatcattctactataaggacacatgcacatgtgtgtttactgcagcactatttacagtaggaaagacttggaaccaacccaaatgcccaacggtgatagactggataaagaaaatgtggcatgtatacatgatggaacactatacagccataaaaaagaatgagttcatgtcctttgcagggacatggatgaagctggaagccatcattctcagcaaactaacacaggaacagaaaaccaaacacggcatgttctcactcataagtgggagttgaacaatgagaacacatggacaaagggaggggaacatcacacactggggcctgtcagggggtggggggaaaggggagggagagcattaggatgaatacctaatgcacgtggggcttaaaacctggatgacgggttgataggtgcagcaaaccaccatggcacatgtatacctatgaaacaaacctgcacattctgcacatgtatcccaaaacttaaaagtaaaatttaaaaaaaatttatttacttcacatagcattcagggtggtaataccatacagagaggcaaattggttctatttgaagatcattcaacttggtgacttatatatggagaatttcaaatatgttctaagtgttcgcctatatatttttggtctgacatggggaaagaaggtttctaggggagactaatctctgagcacttaccaggagaggacacctaagggtcactgttgggaagaagtccaatagttctttgttggactgttgggctgctagtctcatactctccaaccaaggttggagaccatcctggctaacacggtgaaatcccatctctactaaaaatgcaaaaaaattagctgggcgtggtggcacgcacctgtaatcccagttactcgggaggctgaggcaggagaatggcctgaacccaggaggcggagcttgcagtgagccaagattgcaccactgcactccagcctgagcgacagagcgagactgtgtctccaaaaaaaaaaaaaaaaaagaaaatggagctgcctaaattctgtccctggctacttgttaattgttgataggatggaatgcttatggatacagttctgggtatgtccctcagatgtctttcctgttttgagggaaacaaactccttgagagagagtaagaaaaaatttggtgaggccatccttttgggagaccaagatgaacaacaaaacttgtataaagagagtgattccctacctcagcaaaagtaatattagcatatttaggagtggcagggtcaacataagtggacaaagaaaaagcaagaacaatatcaaggcagccatgtcaatcattctacagtgctttgccagcctccacagaattttaagcaaaattttatgcaaaaataatgtgtacctagcagagctttcagtgtattttcaccaaccttacctttttttctgtggagaaagaagatgatctagcttgttcagtaaatattattttcacaaaatagaaaataaatattaaaacacttagaagatttataaaaattctatcaggcatgcagggcatgtgattatctttttattcatgcgattgcttagtggattaagaaaagaaagttgaagccaaattccttttacagggccagcgtaggggtgagtggtgagtggtgggatgggaactggtagaaagtgttttaaaatagaaggaatctgactatctgtttagacagcataatgctactgattcagctaaaatataatgattgtttatagaaattataaaaatccttgataagatcacattgacagatgaagataactacttttgaagattagttttgtactcagctccactgttttttctcactgttaggagcctaagtaccctatcagtctgtgattagattttgatgccagattaggagaacgtgtataatcttgcataaaactcaattattgctgttaaataactactgtcaaatcttaataaagctgtctcactacagggagataagatattttattctttcccttgtcctactgggaggtgtaaatatgtaattaaatttgatgtcattaatcactttcaagttgtttgcttcagactttcaaatataaaccattctaaatcccaatttgattaaagatcatggacaactcaagttcactaggattctgggggtaggttaggttatgatttgtataattgacaaaatatgtattttaaggacatttattgtagttatttaaaatctttgtctgctggttcttaacatctgggttgtctatggatgtgtttctgtttctatcaactgctccttctttggaccatgggtatgacttccctttactttacacatgtatggtagttttacattacttactggacattgtgggtgatagattttaaagtttatctcccactaaagaatgttgaattttgtcaagattggcagatcatcttgatcctatggatgctaggttttaggacacgttagggtgggcctacttctgttctgcccttagtccgatgacacaaatcttagtcatgggatagggttcttattcccaagatgtgacccttctaggggttcagtggtaagtgtgaggggcctaccaagccctgaggtgttcattaagcccctctaaggcagaacttgtcctcccagccccaggagccttctgctcagtcttttcagccgtccagctcttactttctcttgggtttctgaatcttatcttgctcatgcatagtcaggaattatttaaggatttgagcagagttgtatgcatactttgaagctacccactctgtggttctgtcttttccaggaatttttctcctcatattctagctgctgtgacagctccagatacctctgactcctcagtatcacaggacttccattttctgcttgcacactcttcctcttctgctgcatgaactggggtgtaccttcacgataaaaaaaaaaacaaaactgtaaatgtgggtttcatatagtttgctttgctttttctgaggcttatatcccttctagtttatgcctgctttcagtgattctccagtgcctttgatattttgtccagagcaagagggctagtctgatataagttactctgcaattatttttaatgatgaaaattggaaatataaaggggcctttcagaatttcatacataccacttggtaaatatctaacgtagtgtttgtaaaacagcagaaagtcactgtgagttgtatacattcctgtagatgggtgcttgcatttgagaatgtccactttttgctaaagtgctgatctaaaaactacactttaaggtaaattattataaatataaagtgttataaaatataactttgtgtcacattttgtctaaaacttgtctgctagctgtaataaacattaaacattaacagctaacaattttccttgccaggattaggcagtcatgttggtggtccagatttcctgaatccatccaagaaaaactagagccattgccttctttgtcttcttggtaaatgtctgtatagtaagtagagagtagagacactcataatcccttagaacttagctttttatggaggatgcattcgcaatggttctgttgtggtgcttctcccccaaaagggcgttttcagaagtcatggctgactcagcatttccccttttccttcaccttcttgtgagtgcattcagggaggcacaggggcattgtcagatcaaagaaatagacagggaaaaatatcaactgttaaattactttctctttcttctcagctgaaactggttctgccagcctagttccttcaagtacggtgcctatttagctgaacattgtgtatatagtttttctggaaaatgatagcagaagcttggccagttttccatagttcatttatctttttaacataaaacaaagaatgctgttttcttggctcattaaatacctctcatagagtaatcttttcttaaaatgtaatgtgttcaggttttattaattcaagagttatttattgcatgctatttatgagtaccacatataacagataactcaagtctgtggtagtagttgcagttaatcaatattgttatcatattatttcacacttctttgggaagtcataaaataattaccagttcattaacttgggcttcttagagaggttcagagtaaagccaagtatgaaaaaaactgactataatgtggccttctgtacaggggccgccagtgaatggcagggctgggaccatggtgaggcaagtaaggcacaggcctctcttgtgaaatttaagagagtgccaaaaaactcactaatcaaaataatgtttgtatgtagttgttcaaaaaatcaaaattaatgcaaaataagttgaaaattatcaaaattttaaataaggagataagtactactgattttttcttttgccttatgatctagtatggttcagcctgcactggtgagtggagtaagggtcctggaagatccttgactggtgacatgaagaggacatagttttttgttgttgtttttttttgagacagagtctcgctctgtggcccaggctggagtgcagtggcgctttcttggctcactgtaagctccgcctcccgggttcttgccattctcctgcctcagcctctcaagtagccgggactacaagcgcccgccaccacgcccggctaattttttgtatttttagtagagacggggtttcactgtgttagccaggatggtctctatctcctgacctcatgatctgcccgcctcggcctcccaaagtgctgggattacaggcgtgagccaccacacccagctgaggacataggtttttttatgccagatagacttaagtttgagtcctgattcctattaacaattggatctttggcaagttaaagtctataatgctagctaacattattgcgtattagggtctgttctcaagtagtttaacatgtatttactttagtccccatgtgagagagagactatatggaagctaagagaagttaaataattcactcaagatcccatcactctgtagctaacctgagatatactcgtggaaaatgtactgtcaccttgagtctcagtttgcctgtcaataaaatgggacagaattacctgttttaagtttgtagttcaaatggaaccttctgaaaaggaagtgtggaacatttgaaagtatacaaaaaggggacttttcagatcaggaatatgattaaaacactgctttatgtaatttctaaatttaaagacagtagcattaggtaggcctgagtacctcatatcattctagaacactaaatctgcatatagttacatgagtgtacatgggccaggtttggtgaatactgcatttctgagaaatggcctttaacatgaaagctcaatgtaataactgtggatgaaatagaagaagagggcagtgaaggtggggatagaggatattgtctattaaagtgtgcttcagtagagagaactaatttgaaacttctcctttctttttactaatggaacaggagcaagtccagacagatttatgcagttgtgaaattgagacaggttaaattcagtgatttttgataaatgttgttgccagcacaaaagtcacaagttgttgaatatggcaccttacatttgcatagtgagttacagatgcatatgagtatgtcctgtgaggcttttccttgtattaggacttgagatctggaccctttaacagtaccattcctaagtgattcttattaatacttatgtcctattaaaatcctttatcaaatatgatgtttccctaaggggtcttttgtaaaggaagtcttggttactagcatctccatctgtggcccaggcttgagtgcagtagagcaatcatggatcactgcagcctccacctcctaggctcaagccatccatcctcctgcctcagtctcccatttttaaaactttttatagagacacggtctcacatgttgctcaggctggtctcgaattcctgggctcaagtgatcctcccacttctgcctcccaaagggctggaattacaggcctgaaccactgtgcctggccagttagtagcttcttaacacatagcaacataatttccatactattttcaactaatttttattctttcagttgggacctttatatatttcagtgttcagtgaagaagtaggagaatctggttcttaggctctgcctatatccttttacctgtcttgggtaactgccaagaaattaaatcaacaaattttggcctgcagtctggcattaatagatgtgaatttagctaggtttctttcaacacagtctccaggtcaatcgtaatcttatgtgaagtttcttattcaggcatgtctcattagcaccattaatttcacacaggaattctttttttctccctttttttgtgactaagcaaaatgagaaatatttctctttcaggatatggagaggcttaattaaattctttaattttgtctacatctgcccttatgaatgatagcaaaggaatgggggatatcagaatatgagaaaaagtaatcatctaaaaatttccaagcactttaaaatttgttaagctagcataaatatgtgggtgtgatagaggttttcattaggcctcctctcaacatacagtagttaggaatgaagtttagtgtctctccgtcctcctgtcatatgtgtgtatgcacacatgtgtgcacatgcgactgtgttatgcattttgttttcatatttcttttagttgagttttaccttacaacccaacgtaaggtaaattaaactttctattggatttccgcacattttctagatcctatttattcactgtcagtgaccttcactagcacttagtcctctgtgtccaaaaatgtattgccaattcttagactccatcagccttctcctatgaaaaagtaatgcagttaatttctgctcgaaatgctcttctcctaaacagtcttctacttgatctttatgaaaagagttttatgaaagaaaagtgaaaataaagactaagaaaggcattatttaagtgatgggtgatattattcagcgaacacattcaactagagcattctatccagttttttgccttcacgtaaatatgaggagaaaggtaggtgttaataagaaaataatctgattaggatttatgtagaatggtagcatttagactattaaatctgtatagattcaggtcattttcctgcagtcactgtctataatcctgtgtgctgaacactgaaagttagatggactctgaagcactatagaatcctcacttttcaaacaaaagtttaatttttatcacactagtatttattgagcaggctactataactgatcactgtactgggtattgtgaatacccagaaaagcccaagaggcctgtgttacctgacttccttattcacaagtatacgtacccagagactgtctgacagtgaatgcagtttctcctgcataagacatggtggcagtcttctgaagtcttgctggggagatgaagcatacagagatgtgtaaaataaaacagtttgtaatatcccagtgtaggggcacagataataactatggacactcagacaaaggaacaagtactgtgggacaaaagagtaaaatcagaggacttttggtgcactgcttagatcctaaatctttgaatattagtggtgccttagaagacggataggtaggagaagggtgagaggaagggagctgaggagactagaagggactgttatttcctggaataatcattaccaatttcttcatcacattttcttaatgacacagtttcaaacgttttcttcatcttgattgctgtcttctgtgtatatgctggtttgtgtgaggttttactaaaccagtatgtggattaatctagtttcacagtgacaggtaagtgatttagaaaatccttcctttagcacatgttaacttgaacgtttggaggtagaatgcctagagtgagggtgaaggagaggacctggggacaggaagagagggcagctgggagcaattatgctccttccctcagacctttttggccttgactcttgattcttgtacttctaccagacagagaggcggtaggcttgtggccatgttttgcgaggaaaatcagaatctaagaatctctaaggcaagagcaagaatggattgggatagggaaagtgataggaaaacagaggcactaagaagagggttggttttcatgtactgcatagttcattcccttagttgagaaatcaggtatctcaacctcagatatcttctgtccagcatatcgctggccagatctgattcatatgagggatccagagtaaggaagcatctgttagccaagtctttggttaccccaaattagctcaggtcctttactgcttgtttcctctgattatatagtacatatccaaaccctcaattttccagaataaactaggtctgcctattctgtgtggaaaacatttgatggtggttaagattctcttgcctagacgatggtagtgccttagtcgtttaactgcctgtcactttaagattttgaaatactggttctcgttgtgtaagccagacacatcttgagaatattttacggggcaacttgccctttctgaaacctcagtcatcctgaaaagtaactctgtacctccttgactttaatttttctgtcttaattctatttgtatacaatgtttgtggtgtctgattctctgtctcgtattgctgaaactcatggccttgaatttctgggtcactcttaaaaaatagacataacttgattactaatgaaaaagtgactcattttcttccaggcaaaggctgacactgactgtcacagtttgtgacagaagcaaactctctaattaggagacatcacctattcttttctaaattttataagaattgatgatagcatcatgagatgggaagtgagtaagataagcgtttatgcttgtagagaggatgcataaaaatgaaatctggataaagttctatctgaatttaccattttaagtggttgattccctgtgagcttaaatttagtgcttctcttcccagaccgttgtcttacatacacacttcagtcagttttagccttgtataactaatcagcaggtcagattccatagaggctgaaatacctaccaccattctatgctcaagaaaacaggctctcatgttggccagttgtttgggatagaagatggttagacctttctatcccttttaaacacaagattctttttcattccccttatcttatttaaatatattgttccttctgtttggttgttctttgctttcttatgcatctgtgaggggctagctgaaagtgtgagttgtggaacaattcatttacataagtgtatattgaattatctgtgcacctagagggtgatgggcactgtgagggatattaaaaaagagacacagtacagttcttaccctaggatcccctgcttggagtgggacagtggtcaagacatatacaaccacaaacacccaaacattaacatcagcaagcatcattacatccttgggtggtattgccaagggacttcaaaggccaagattatagagtcatcacacttaggaggtcaaagggactttggaaagcacctttgtcactcattttgttttataagtgaggcggctgaggtgtaatacagctaagcgaattagcctttattacataactcattagaatgtagactgggactaagagctgtttctccagatcccattaggcaatctaaagattctgcactatttctttttcatttttggtatccaaataggtacagttgtttttgatctaggaaaatccttttagactaaacagtaagctttttaaattactctgcttttagatattttttggacttcagaactttgaaggtggtcatccaccaacattggggaatggaaagaaggctccaacacttttctttctagagatcttctttaattttcaatggcagtcactacagaatctagcagttcatgctattgaggccactttgtaggatttttttttttcttagtcagggctccaggtccctggtggtttatgtagtcagtcttttatcaacaaccgatgaaagactaataaaagtgcaagagggaatgaggactgtgtgtgtgtatgtctgcacatgcacacatgcctctctgtgtgtgttggttaacttcatatttggtaggtgggagggaaggtgattaaaaaataatctactttgcatggagttggcccaatttgactgatataggggtgagtgggggttaagaagtagtctatatatcaggaatcttaattagttttgaaaatcctttaggtaaatagctcaacccagttgttcccaaacttcaagtgtatttatagggtctttttaaggggtaaagattccacagagcccttcattttgaccttgtgcttctgcactgaatagttgaatgccttctatatgccagtcattgtgttaggcactgggagtatgagaattaataattttagtctgttgacagataatcataataagggctaatgagtaacacaggctcagggttataagaacagagggggtatcaaggctgtttttcacaggaaataacatttaagttgagacttaatgaaattttagggcttagccatgagaaagtggggaaaagcattttgggctgactgaacagcgtgtacagaggtctggaagtgagaagtagtgtactatagcattttctaggagctgaaaggcgtttagcaagagtatagtgcataaaggagagagcttgagatgaaacaatttctcagtgtgttgtttgaatacaatgtatactgtcaaaatctaagaattcaagaatcatttaatatatctttatgttttactagtcataaaagcatatacatatatttaaatatggacaagatactgtttagtagtttagaaagtgatttataaggattgcaatcccttgcaataactccacagcccataccttgggaacaactgagctaactcattcagttttgtccattacatcgaagggtgttttttgtaaactcatatgtctagaatgtgtttgccatgttttaatcacaagtagatattttctcagggtccagtgcagtgaagtatggtaagatcctgattgtgttctggaacacagaggaaagaccaccttctgttatagcaacaacacaagtcttttaacactgtgtgccccttcccaatctttcaagtgatgattgaagagactaggtgctcagctcagcctttgagttctgataaatgagcccagactgtaaactggaagataaggatgtttgtaaagttcttgtataaataaagcatggtttctcattgcagtggttactgatttcatagtctgagtgaagatgaatgatgctgtgaatcaacagctttaaagtccgtatcacttcagcttctttttggtttaggtttcttaaaatcagtgtgtatttaatgctttattcagatgagggggtgaaaaacctaacacatgtaaactaagtgaggtggggtttcagagataattcccagcctcacaattcctcgtgaagttcttttcctgtgggaaacttttaatttggaagcatgcaacctaatgtgggaaccaagattaacattttctgaaatacttctacaagaaaagcagaaatggtctgtccaggaagctgaatttacatagtagaaaaatgagctgccctgcagtatttggtagtctttgtgtattagttgtgataaaagtgtgtatgtgtgtgtgtacgtgtgtgagagtgagagattgtatacttgtctttgtttccttcacatacaactagtaaggccctagaaaaactacactagaaagtgtgttttaccacaagcgtcccagttctggacaccaatctatacacaaatacttttttttaaagttctttttgtttttccttcttgctgagtaagctatagtatttcctttttttctttcttttttttttgagagaagggggggttgagagtagagtgggaatggcaagaagtagtatgacagagcttcttctctttttttcccctctttaccaggaagttaactagaagtcctcatgcatgtttttaaaacaaagttggtaattagcataacctagttagttacctttacacagagtgacagaattaaaaagttgacaagcccatcagacctcagccaggaggtactgaaaggagggagaccagtgagtttagaccaataggtgggttaggcctcctgaatgccagcctagaagtttagacttgattctataggctctggggtacctacaagtttgtagtcggagccttgggaattgaatgttacataggaactttcactggttccagctagccttggctgttagcaattatttttatctactttaacaggggggacagagtaggggggcaggaaactaagctggcattatggtcacaggaaagaacagactgatttggagcctttcaaactgcagacctttgttactgaccgatgcttaatttggtttctgggttttgttagttttttcccctgcccttacctcatttaccttaacgacagctcccccctctagagctcagctagggcaggctgccactgcggattggggggccaagaggcccagcgcaagaagaaagtgggttgaaagcagagttctgttcaaagaattttctgctggaaactagcccagagggagtaaagaggagctttaatgaggagcagctgcagtgccgacgcaacccacatgagactttttttccccttcgttccacattctgtatagtttttttaaaaatcatgattttgaaatagctgttttgtaaagcatgcctctctttttcttcttgtatgtggtgggattttgctttgttgttgttgttgtttttttttgaatggccaaatcctcgtttttaaaaaaaaaaaaaaaaaagctaaagacagagctgcagcaaagccctggatgcaatttggcctcaccctgctgatacagaacattcggtggagaaaacaaggggagagaacactggcttttatttggaaaaggggcttatttcctgctcagacttcagtcatcttggagctgacacaagctgctacactgttttaagcttttctgtagacgagtggctattcacttaggaaacgtgaaagaacaaatttttctgtcctgtattactagggagactgatcctgaactgcagccattgccagatagattggaattgctattcagatcccagcttcgttgaaatctgtaaagtggctacatgtaaactaatccaggctgctagtgagatgtgagggttggggtctggttttcatctgcttaagtgagaggaaactgtaggggtatccttcaaatggaatgttttctagttccattaggaggaatcccttgtttttctctgttttcttccttcctttgcttttctacatccaaccccatgcgtatgtttgaacagtaacaatggaaatgtggacctctcaatgtcagaaatgacacttttttttttttgagatggggttctcaccatgttgcccgtgttgtctaggcaggtctcgaacttctgctctagcaatctgcttgccttggcctcccacagtgctgggattacaggtgtgagccactgtgcccagctgagacttttaaagaaaaagtcataaatacatctttatggacctggtaagtattcagattagtttatggagtttaaaatggaaaaatgctccccaaacctttctctgtattcacaacctcatctgtgaagtatgttctttcagagttcaatgctagagaagagagagtaagtaaaagtcactgagagacattgaagagacagttatgaaaataattaataaactccctacaggaggaaaacattcatatagttttgcggatgaaaggcatctgttagatttttgtggttattttttagaatatacacctttagttcaagtggtagactattttccaaaatgtgtgctgggtagcttaatggaattatagatatgtaagggttgttgggtgtttagccatgttttcactctctaaccaaattcaactttagccatctcaagaagacagctatttaagcccttgttttcaagcagagaaccttactttccaccaagactaacagagtatattttctccttataccacagttgaacagggatttgcaagttgaaagatctcctgccttaggaaacaagggtctgttatttctgactgtcttacctattactcccctttcttcccatgtccataatgctgcttagcttcctggggtgtgaaggataattctgtacctcaggatgactattaggttgatttggcctgttattctaccagacagatcacagagtagagatggattttgtggaacatttggattgagagactgactttatccatcacatgaaatttagcctgctttggaaccagctgcttagtggggtttaggtactcaggtattcagggaacctacaccaagggttcaagacaggctcttccccacaaaaactatctagatgggagtttgagaaaggtacagcaaagacataacagtggcttaaataaagaagaaccataccagtggagacaatgtagtgcatgacatggcactacatctgctgttggaaggatcagagataggtgggatgatttgtagaaggcttactataggacaggtttacagcagatttttgaaaaaagggtggaagaaaggaacctaagttggagatataccagaagggaagcatgatgtttctcactggaaattaaaaagattttaatataggggacagtaaacaagattgtggaaataatatggagtgttcgagttatggattactaaagagtaagatggttagatgattggaatgggacagacaggcagatcagagattgtaaagaacttggatttgaaaggcttggtattaatactgttgctagtttctgagcagaagaatgacatgaaaattatgcttaggaaagattattcttttagtcatatgcttaggttcagcaaggaatttccagactgtccttagggagaggagaggtatggataggatgctggtccatttaggatgttagagctgattgaataggtgctagtcttggggcaagacttagtcatacactttcagttaagtactatttcattgcaaggtctaggtgaagatagggatatatttgtaaaactggggaaattgctagattcacagataaccaactttgggcaaatcagttagctttggtgtccttttcagtgctataggggttcagaccatttggtttctgagatcactgctgaaattctgtgattgtatgagtataatgtaaaagttgtctcaatcaaggaaacttggagtaaagactcaatatgatggatttaaaaggaatgaatgacagttccaattattgggttcaaaaaacatgtgctacaagtataagatgagaaaaatagggtacactagtagttcatgtgaaataaggctctgaatattttagctgagtgtgtattccatagcacatagtagtattttgtggcttctaaaaaagtacacatatccattgggtatgagtcggagcattattctttcttgaactgcgctctcacgatgcctcctcagtttaagaacttactctgaaatagtaaaagcatagtgtccagatcaggaggtcatggttcagctctgtgctgcactggtaagaacatgtgttaagcctttttccattttgagcctcactttttaaagaggtttttgatgaactggagtcatccagtgatggggaggcaggatagcctagtgttgaagcacacgcactctagagtctacttgggtttgaatcctgcctcttccatctactagctgtgaatttttttttttttttttttttgagagggagtctcgctctgtcgcccaggctggagtgcagtggcgcgatcttggctcactgcaacctccaacttctgggttcatgccattctcctgcctcagcctcccgagtagctgggactacaggcgcccgccaccacgcctggctaattttttatatttttagtagagacagggtttcactgtgttagccaggatggtctcgatctcctgacctggtgatctgcctgcctcggtctcccaaagtgctgagattacaggtgtgagccaccgcgcccggcctagctgtaaaatcttaatctttctaagcttcgagttcctcatatataaaatggagattataatatagcactggagcgagtaatacaagagacaatagctatcaaatgcttagcaaatatacaatacatagttaagtacttagaaaatatgttttcagttacttcgggtatatacctgggaagggaggcagaaaattttggtcattctgattattatgactactattaagcatagaagcaccactaaaaaggtgaagaaacctggaaataaccctatactgaggaatacgccaaaccattgaatcctggaaaaaagaaaacaaaaggcccacataactgtcttcagattcttgaagggctacgtgtaagagaagcagaaggcttgttcttttttgttctagagggtagagataacctggaaattgtagagagacaaagtttgttcttttcaaagttaagacataatttatgtatcataaaatttacccttttaaagtgtttaatttagtagactttagtatttccagagttatgagaccaccaccattatctaatttcgaaacatttttatcaccctgaaagaaattctctactgcttagtagtcactgtctatttccctttctttacagctcctggcaacactaatctactttctatctctacggttttgcatattctggacatttcatataaatggaattatataatatgtggccttttgtgtgtggcttctttcacttagcatgttttcaaggttcatgcatgttgtagcatgtatcagaatgtcattccttttcatggccacatatttcatttatggatataccacattttatttatctgttcatcagcttataggcatttgggttgtttctactttttagctattatgaataatgctgctatgaacatttttattatctgggcatatgttttcagttatctcgggtatatacctaggaagggaggcagaatttgaagaattaagaaagaaagagctttctcacagtgggatccacccacattgaagactgttcttttgttgaagtagtcagccagtaatttcacttaacaaatgcatagtgtttactatgtgctggatagtgttctaagtgctttacccttatttaaaaatcctatgaagtaggcactgttattacatctcttttacaacagggaagtttagtaccttgcccaagattacacattgagtaaatggtggagttgggattgaaatccaggtggtctggttccagagtctgtactcttaagagcagaacaataataactccaagcatttattaaattcttaagatttatccggcaccatgctacatgcttgtattcaagcagaggctggtgatcatcttttagaaatattttagaaatgattacttaattggatagaaattaaatttcttgaatctgaaggttctgttattccaaggatggctggaaatggaggaaaagccagcaacaagatgatgtctggcctgaggcttttaagatgatcagaatttgtatcaaaaaggaaactgtgaacacgaatgataagtattataggaattcagttaacaagtcttgtcagaatgtggtaataaattatatacaacttaaagagatgaagttactttaaattgtgtgtggaagccttagaaaaattgaataattaaagtttcttgggaagatgatctcctcttacaaatgtttagtttcaaatagtggcagcacatattaggatagagagatgacttctagaaaactgaacatatgggactggaacagtgtattttggagtcagttacaggaaggaagttgtttaaaaccaagtgaacaacaacagtaacaaatgcatttgagagaaagagcagtgcagtccagacttaaacattagggtggccataatagatggggaagaaggagaaatcagcaatccagactaagacttcactgggttttgagttagacagagggagtcatagaagccaaggtaaaatgattaaaacggtgcgtggagtggttagcaattctccctataggagagagaatttccttatgaagtttcagatgagaccactgaacttgactagaggaaagtcattgtttttagaaaacagtttctaagcaataattagaattaaagttttgttgcggagggataagtaagaagtagatggaaaagaaagagaaatatctgaaattaggctacagtcatagaaggttagctgtgaaacaataatttggaaagggaaatgggacctcatgaaagtgtgggttaaaagagacttgtatatcttctaaggtaaaagtaaagaactaagctgatgtccagccctctaaaacattttaaatagaaatcaaactttattaatacagtaggtctagtttcacataaagcaaatatatggttctgtacatgggctttaggagagtaagtctgttgtacctcatatgtaagtattatcccatttagaggaaaaccctaagtctttctttacagtggcttaaaggccccaattgatccacatcccagttacagctctcatctattttctgctgctccagatattcttgctgtttctcagacacgctagggctgctctctgtgttatggcctttgcatttgctgttccctttctcatgaatgtgtttccctaagatacctgcatgattactctcaccttatttaggtctcaactcaagtattgtcagtgaaggtcttctctgattttcctattctaaactgagatacttctctttgctcaccccacaccctcatccccagctccattccttcctgtttaattttttttcacagcacttaactccatctattgtgcatcttttacttagtaattttgttttcgtcttcagctattagaatgtaaactccaagagtgtaagaatttttctagcactggaaaaatgcctggcacataataggcatttactaattgttgtgtgaatgaatgattataagtttaatattctttgtggaaactaataaggttgatttcctatcagaaaccgatcattattaataagcatattggatggtatttatagaattagccttcatatgttctctactcagaagttggcaaactttttctgtaaagtgccagagagtaattatttttgcaggctttgtggtctcattacagctacttgactctgttgttgtagtggaaaatcagccatagacaatctataaatgaatgagcatggctgtgttccagtaagactatttatggacactgaaatttgaattgtatataattttgaaatgtcagaaaatatccttcttttgttctttttttctaatcatttaaaaatgtaaaaaactattcacaggccaaacaaaaacaggcagtggtccaaattagacttgcaaactgtactttgtcaatctctggttttactgatttcttaaatatatcttaggttaaaacttatttttccatacttgatagggagcaacaatgtgaattaaactgtagaaacaaataattcagaaatacatctgtttagctttagaaacttccattttgcttcatttttgttttcctgggaaccttatatttccattatatgtttatgatgctaccatttaaatgactttgcattctcttagcatatgccacatgatagtgttagggtggtgtaatagttcaggagcaaagctgagcaaagcccacccacgtttaaaaatttgccattatttagaaggtgcataattcccatatgggagaatgaagagtcatctaataatgcccagagggctgcactgtgagtgagaattgtgttgcagtttttaacattcataacacatttcttgaataagctgcaaatgcttttaataatatatctcagagttaattttagctatgctacattggcactttttgctcctccacttcaaaaaaccaacacaagaaactattctcaaatcaagctgtgatttggatggggcattgtattttcctcaataagcacaaagaagacagaaaagatgttttcacttggcaaaacttttttttttgagatggaatctcactctgttgcccaggctggagtgtagtggcacaatctcgttggctcactgcaacctccgcctcccgggttcaagcaattctcatgcctcagcctcccgagtagctgggattacaagcgtgcaccaccaccctggctaatttttgtatttttagtagagccagggtttcaccatgttggccgggctattctcaaactcctgacctcagatggtcctcacacctcagcctcccaaagtgctggcattacaggtgtgagccactgtgcccagcccacttgcaaaactttttaacatttataaggttttttacatacttgattttgttcagttcttagaataatctcatgatgtaggtgaccttattaactatttacaatgtgagaaaatggatagtcagtgaagataagtaacttgtccaaggtcacagcaccagaactccaaaccagaccttctgaccttcttgatacagactcctcacagtcacctgcatgccatctttggtttcagtgctatgaactttcttcactgcctgttggtctgtagctacacctactcatgaagatgcccagagccttagccgctccttgctccgccatgcttatcttatgcagctctgggaggggtgaagaggctgtggccagttacctcactaccactatagctattcaccaccctgttttctcctttagccattttagctaccgcacaattcttctgggcattttctgtcttagttccctcgtatctggccttccttcttttctcagtaactgtgacccctgctagctagccttgccaaccaatggttaatgaaaggtcttggatatgactgtcaaagacaaaagcactcatgaccccagtgtttcaggtcacaatgattaggaaaatcaggacaacaaggcttgggcacagaagagctggtttttgagagggggatttagagtttggtttaaatgtgtaatctttgaggtaatggtggaacagcctactagattcagttttctagtccctgaaaactaaaacgaggaataagttgaatcacatatttggggcaccagccaaatatatagcagcatttatagttagaatcaaagtgtttgtgtttcttaatttaaatgcttctcagagattccatttaaacaacttcattatgaaaatggagacttaccatgcctttttgatattgttcagagaaaattgtcataaataatacacacagtttgaaatggttgtacatcttatgaatcaaggggtggcatgtaaaaaggttcctcagtgcctcaatgtggaaaatatcatagaatgttattcttcaattgattccttccttcactttggtgtttatatggtatcttagatattttatgttattttaattatattttgtgcctttttatttggttaaaaatgcctactacttaaatattaacagatttttaaatatccctttgaactcttccccattcctgtacctcctttccctttttccgttgtaatgtcagccacctgaacataacccagaaaactaggtatcagccaattgatgtttcagtggaaataagagaaagaagcgcttactatttctcaatgcttaattgaggaaaagcacatgatatcttacatattttaaattggaggggataatagggtcaagttcatgcattatattgtggacatcttaatcctatcaaatggcttagtcaaaatgagaaagttaatgaatttaagcagacaagtacgaacagtgctctaaaaaaggtgctgttacaccatcccaacctgtacacacatgaaaaaaagctggggtgcattttgcgtttgaataagggtcatgttgactggccatggcagaccctgctagaccatacacctgatactctgtcacctgccaggactcaaaaggacatgggagtatgtggttaagttctctaaggactctttcttctaaagggaagcagttttataggtggtccttgtaggtctgttgattcacaatctcgtgctttcttgattggactgtattgttttactgtaattttttggacttacaagaagtcaggtgttttcatggactcttctcttttccatacagatgtccagaaggcttcttgggggaatattgtcaacatcgagacccctgtgagaagaaccgctgccagaatggtgggacttgtgtggcccaggccatgctggggaaagccacgtgccgatgtgcctcagggtttacaggagaggactgccagtactcaacatctcatccatgctttgtgtctcgaccctgcctgaatggcggcacatgccatatgctcagccgggatacctatgagtgcacctgtcaagtcgggtttacaggtaactaatgagaccaaagccagtggtttcctaccttcagcagatacctttatttagcatcttttagatcatggtgtctggctcttaaatgtcccccagctctggtgcacatttaacattatgataaggaactgggatgttccagacaactatccctaacttccttttaagagtttcagggggcagagaaagagaaagaaaaagtaccaaatactttgactgcttaaagtatatatgtcagggccaggtgcggtggtgcacgcttgcaatcccagcactttggcaggccaaggcaggaggatcacttgaggctagaggtttgagaccagcctgggaaacacagcaagaccccatctctacaaaaaaacaagaataaaaataaaacaaaattagtcatgtgtggtggtgtgcacctgtagtcctaactacttgggaggctgaagtggaagaattgcttgagcccaggagtttgaggctgcagtgagctatgatcgcaccactgcattctagcctgggtgacagagtgagaccctgtctcaaaaaaaaaatatgtacaccaggatggggaatcagagtttacttcactaaaagaaataagtacactgtcaccagaggaaaagttgctgaagttattgactatttgcttttagaaatctccctccctagacattcagggcactggcttttctggttttctgaaccctgttccttttgcttcttcattaccttgttcttatccattaaatgtttgtgctccctggagcactgtttttcgccctcttttgagccacatcacagctctccctagggaatttcactgtctgtattcgcctccactgccactgtcttcattagcttgctgatgaatctcaccatcattcccttagctccacccaaccctgacattcaggctcatgtttctagctatcctttgtatgttctccttggagatattctacaggtactttcagctcaccttgttgacagaaatacgtagcaaccatgtacatcccaaatacccacgctagaaactccctgtcccttgttctgacctcatttcaactcagtcacccaagccaacctctgagttgcctttcacctgtctattcctcccatttcctctgctaccctgtagttgagggccatgttatctctcacctggacttctgaaatagtttctgaatacgttttcttgcctttattctctccccatctcattcacccatgatattactacatctttgattataaatgcaaatattctaacaatctcacctgcttacaatgtctaatattttttcatcatccgcagaataaactgcaaactcttttacatgacttccatagctctctacagcctagactttacatctttttgtagcctggcctccccacaagcatctaggcctagtcacaccaaattctccttatttcctgaaaatgttgtacttattattgcttccatacagttacacacccttttgcctggaatgcccttttctacaactggtgattgtccaatgttatttaaaactgtgtcttagtgaccctttcatgattcctttaggcaaatggtctctaagttttattagttttatgtatcacattttattgtaatttttttttacacatatctcacctgaatagattgtgggtttttctaggtgggtctgagctttattcaaaagtgtttattaaattagatgagaaaaggaggaacattcttcattttttctcctgctttaagcactaaaccaagagttctataaatgcaataagcaaaaaagtgaaaaatgtactcagaaaactatactggatcagttagtgtagaatactgttatattaatttttcattgtattagggttctctagagggatggaactaatggaatatatatgtatgtatatatattccaacccaaagtgtcttggtggcaatcttaatatatatatattggcaatctttatatatatataaaggagagtttgttaagtattaattcacatgatcacaaggtcccacaataggctgtctgcaggctgaggagcaaggagagccagtctgagttccaaaaccaaagaacttggggttcgatatttgagggcaggaaacatccagcacgggaaaaagatgtaggctgggaggctaggccagtctcgctttttcatgtttttctgcctgctttatatttactgacagatgatcaaatggtgtccatccagattaagggtgggtctgccttccccagcccactgactcaaatgttaatctcctttggcaacaccttcacagacacacccaagatcaatactttgtatccttcaattcaatcaagttgacacactcagttttaaccaccacaaatctaccccttgtcaacttgaacccatacacatctcctgagatcacacataatcttcaaataaagacaataattaggtcataattacacctgatgtagtacaactattcttcatacatccggaaacacaccagtccccagctgaaacactcttacataaagttaacgatacttaaatgctgatgtgaagtcaataaatcttatgtcacatgataaaggagaaaggaaataaaatgaagatattttcttagtacaagtgtgtgcaagcacagacatgtttttaataaaagaaggaggaaatactgaggacaattacagtcctcatttctgcagctggtcacatggtagtagctggtattgatgactaccttcttctacccattttgtattccttttgccttcagcaaacacctcagcaggttatgtttttttttttcctgatggagaggcccaaaccttcattcatccaggtgggaccatttgtagttccgcctggattgggctgttgtagttgcccattgaccttaatcacagggcatggtaatactaagagacgccctaatggatctcctgtattccatgaatactctttcttacctccgttctggagtagtagactgatttcatcttgatagcctgggtcttgatagccttgatgtcccagccaacactgtaacgcctttcttaccctgtttacttaaaggtaggaacccaaagtgtcctggtggcaatcttaactaccagtttaatggaattgttgttgtgtcttctggtggcagcattcctccctctggaactaagacctctaggccagcagaacttaatgttgcgggaacaggaagcaaacattttgctagtggatcactaggggtgatggtgagtggtaccacttccatttccaccccttgattcctggacctgtgaatcctggctatgggagaagcagtaccacatattggacgctgattcagagcatacacagccttcttgagaactttgccccaaccctgcaaagtattctcacctagttggcattgtaattgtgactgcaaaaggccattccaccgttctgcttcaggatgttggggaacatggtaagaccagtgaattccatgagcatgagcccactgctgcacttctttagccataaagtgaatgccttggttagaggcaatgctgtgtggaataccatgacagtggataaggcattccatgagtccgcggatggtagtcttggcagaaccattgcatgcaggataggcaaacccatatccagagtaagtgtctattccagtaaggacaaacatctgcccttttcacaatggaagaagtccaacataatcaacctgccaccaagtagctggctgatcaccctgaggaatagtgccatatcaaaggtgcagtgttggtttctgctgctggcaaattgggcactctgtagtggcagtagccaggtcagctttccaccggcccatcttgttttctgcactgggaagttggggcatgagcacaaatgttaggacctgaaaggtggtgaactctgcctgggcagggcaaagccagaggaaactctggtggaggtccgtagcagtcctgatgtgcaaatcggtcatccaacctgggtgtaggggcgaaagactaattgaaccatctagtagctggttccctccaaagtttccctcgggatagttggcactctggcaaaaaccccactcttggtaccaatttactgtattagtccattttcacgctgctgataaagatatccccgagaccggaaagaaaagaggtttaattggacttacagttccatatggctggggaggcctccgaattatggtgggaggcaaaaggcacttctttcgtggtggtggcaagagaaaattaggaagaagcaaaagcagaaaccctgagaaacccatcagatctcatgagacttattcactatcatgagaatagcacaggaaagactggcccccatgatacagttaccccactgggtccctcccacaacacatgggaattctgggagatacaattcaagttgagatttgggtggggacactaccaaaccatatcattcatcaaaaggtgttggtggggtagagggtagttaggatgatccattatctccatcatgacgatgatggtattgatgatgtaagtcactgaaaatatttggtgttataagaataatttcttcctgattgtcagttttgagttgttttgctattaggaggcaaagtaggggggcatatacccacttaaaatattttaattctggctagtggaaatgacagtaatgccttcttcataattaaaatgtcactctgaaatggtcccaaattaaaacttcttcctttgttgttaagaaggatctcttcttggtgtgttctgcaagattctgatcaccttttttttttttttttttttgagatggagtattgctttgtcgtccaggctggagtgcagggcacaatctcggttcactgcaagctccacctcccgggttcacgccattcttctgcctcagcctcctgagtagctgggactacaggcacctaccgccatgcccggctaatttttgtatttttagtagagatgggctttcaccttgttagccacaatggtctggatcgcctgacctcatgatccacctgcctcggcctcccaaagtgctgggattacaggtgtgagccaccacacccggccgattctgatcatcttttatacatatgctatttttgtctatcactttaggaatcatcacagatcaaagtcatccttttggtttttgtgatagcactatacctcagtcagcttactagctcatctccactcagagatgaagaagcagaggcagcaagttagtgcctatacataatatatatggaaaccaaattcagggttgattctttctttctttctcccttccttccttcctttctcccttccttccttccttccttccttccttccttccttcctttctttctttctttctttctttctttctttctttctttctttctttctttctttctttctctctctttctctctttctctctctttccctctctctttctgtctgtctttcttctcactctgttgcttagtacagtggcgcagtctcggctcactgcaacctccacctcttgggttcgagtgattcttgtgcctcagcctcccaggtagctgggattacaggcatgcgccataaagcccggctaatttttgtatttttagaaaagatggcatttcaccatgttggccaggctggtctcaaactcctaaccacaagtgatctgcccacctcagcctcccaaagtgctgggattacaggcatcagccaccacttccggcccagggatctttctgtttcagttgtgggcatcactctgaaaatcacacttgctagaagtgagcatttatatctcttctccactgtaaataagtgcctcttagtgacatgagtggaaagacaagaagaattgcagttccttcattttctgtcttagctccctgagatgtatatgctgtgcctaaatttgtgttatagttttctcctttgatttgacattccttgataggcagagagcacttttctgtgctcatatgtcacatctcgcatctttttcccttatagaaaaactcttgtgtctcccatttacctttctatgaggtcagagatttagatactttcctagacaatcaactggagtattaacaaattcaaggagttctcgccatcccgttactggatatatacccaaagaattataaatcgtgctgctataaagacacatgcacacgtatgtttattgcggcactattcacaatagcaaagacttggaaccaacccaaatgtccatcaatgatagactggattaagaaaatgtggcacatatacaccatggaatactattcagccataaaaaaggatgagttcatgtcctttgtagggacatggatgaagctggaaaccatcattctcagcaaactattgcaaggacaaaaaaccaaacaccgcatgttctcactcataggtgggaattgaacaatgagaacacttggacacaggaaggggaacatcacaaaccggggcctgtcgtggggtggtgggacgggggagggatagcattaggagatgtacctaatgtaaatgacgagttaatgggtgcagcacaccaacatggcacatatatacatatgtaacaaacctgcatgttgtgcacgtgtaccctagaacttaaagtataataataataataataataaaaattcaaggagttctcatctctgtagtttaaataataagtgacttagactaatgacaacaaaaagccagccatgtgaataccaaatttactagttctgtgaggatatttttttctctttctctttctgcctcaaagaatctgctttgcttcccctgccatcatgatttagttttcaacccgtcagagtcttcctgctagtgctggtactttcctacttgagaaagtccacggaataccttcgagacctctgtcctcctgatggcttctatttcatttgttatatagggacccagagttccttcatcattttcaaacacatcaacagatatttatagcaaggccacaattaataaaatgtttcccagaatatatgtgtgtgttacatttagaggaaacagaagtagtattgacttgtttctatcaccagaggtctatttagtaactatattttgtggaaaatatcgatatattttatccattcaacagacatgatttgagagcataccatggagacccaaccctgccagtgtggcaggtggtataatagaagaaaatagcaaacttggtgtatctgtgtttgcgcacatgtatgtatgtgaggggcactaaggatgactttacagaggttggaacttttgagtacagttgccaagatagggagagttcactaggaaaacagaagggaagttgatttttttttttttttttttgaaatagagtcttgctgtgtcgcccaggctggagtgcagtggtacaatctcggctcactgcaacctccgcctcctgggttcaagtgattcttctgcctcagccttccaagtagctgggatcacaggtgcgcgccaccatgcccagctaatttttgtatttttagtagagacagggtttcaccatattggccgggctggtcttgaactccttacctcatgatctgcctgcctcggcctcccaaagtgctggaattacaggtgtgagccactgctcctggcccggaagttgatattcaaacaggagcagcatatgcaaagacagtgagctctgagagagtagatggatccagactcctattgctgatagcgtcctgcaggattgggcttcaatgtgactaacctacaattgcctccaggtgctccacccactgagtccttgtgtctctgctgaggtccttggagagttactggagagggctctgtgtcagattaccttgaggaggctctgatttagccttttgtaaaatgcaaagagttgaggtcttctccacgcaagagctcgctgatgtcaatgaggtattgaggatggggccatctcctatttctgtggccagtactgagttttgttatccttcctttaggtaaggagtgccaatggacggatgcctgcctgtctcatccctgtgcaaatggaagtacctgtaccactgtggccaaccagttctcctgcaaatgcctcacaggcttcacagggcagaaatgtgagactgatgtcaatgagtgtgacattccaggacactgccagcatggtggcacctgcctcaacctgcctggttcctaccagtgccagtgccctcagggcttcacaggccagtactgtgacagcctgtatgtgccctgtgcaccctcaccttgtgtcaatggaggcacctgtcggcagactggtgacttcacttttgagtgcaactgccttccaggtaaggagctccctagtgtcccaggattaggggacaaacccctagcacaggaggtagtgggtgtggctcaattgctgtttttaggaagcccaaggaaaaagggaagtgagaattttgtgtggggtgggttgctagtgagggaggagttttatgggcccactgtggtccataaactgagcaggggataatttagcatgtcagggtttatgatgatgagtggctagaaaattgtttattgtcccttttgtagaaacagtgagaaataagaggaacagagctctgggaaagggacaggcaagtctggaatggaaaagaacacgatgagaattagacactggaaaatatgtatgtgtggttaataaagtgctttaaactgaattgacattaacagtaggtgatcaactttcctatgtgcttgtgcttttgcttttgatggagtaattcattgttttcttatccacctaaatgcacccagctgcccttgattttctctgggctactggccttcacaaccctctcccatgtaccctctctgactttggggtaaccctcccctaacttaaagctagagaattctgaaactgaggaggggatcctctgttaatcagtgagcactttttgatgagctgatagatgatatatgagagactatgcgtggcacaatactttgttacactcttcactgatacaagtgttctagagtgcacacacaacccaaagatagaaacaaaaagaggagcagtgtcggggagcttggggcctggtgttccatggagagggagaaaggaacaagcctggccaattcattcaactccttataaaaatgatgaggaggctgaaaaccaagaattttgattgggaacagaatacaagcagctggagcagatgaattactaagcaacaaagatcctgtttttatacaaatatccttagtacaaaaacaaaagaaggaaaactgtaggggggagtaatgtgctaagtaagcagaattgcctcaaaaagaagttgttctagttactctttcagagtgggaatcttagattctggtattgtggatatggttcacatataatgggattgtgtgttttattttggagagattaaaggtcataggttggtcctcagtataaaatcaactggtaatttattcatttcatttggtaaaaatgtattgactgcctgctatgttctaggcaccatgctatgtatttggaatacagctatacaaagcattgtcacataattgaaatgaaaactttatattatttaagtcacaagaacaagctatttaattatattacttttagtttctcttttaataaagaatagataatgctatcattctagatactaaataagtgttttcttaacataatattactattcactttatcttgtagaagaaataactaaaatacgtctgtcttcactcctgcatttgtttgcattttaagggttaaagacagaaatagaaatgtaaacaactttattttgaaaatatttcaatattgcaaatatctctgggtctgatattctagtaatctaattggctagtaattgatgttagtgtgatttattgttgaaggctaaatgtgtttttcagtttcaagaaaattgcttttaataattgcctagaacaagaggttgatttggcagcaagatgttgacgggaagttagagaagtcaataaaggaagtttttagctgagagagagtgattattcactcccatagcctctgcattgttatccattagccacgataagaaccttagggaattctgagagtgtgtccaggaaaggatctgtcaaactagaatagtatctcctccttgagaaaggaaataaccaaggattccgcagctgagaggctgccagggctagtgaaatagagtaaggaaatcttggctgtctcttattctctggttgtagtttaacgcaagacacttatttactcactgatggtgtgtgtgtatgtgggaggggagattagcatgaggggtgggaatggggagatttgatgaagagaaaactaacatttttttggtgactcaggaactgtgccaggtacttccatgcttattagctcaattacacaaaaatcttgggaccaggtattatttttcaagtcttcccacatgaagtaactgaagtttggagatgttaagtgattcacccaaagttgtacagctaatatgtggttaggctgggtcctgaaaccgaggcagtttattttcaaagcctttgctttgtgcatcttactgcgccacattgcactgcacatctgcttcctgaaagcactttgtaggtgtgtaaaacttttcgttaaatgctttaagctgtttgggttaaaaatatatgttcatgttataagaaaaccaagacactcctaattataatcaaatagtacttgttacatatcaatatgtgtgtgtgtgtgtgtgtgtgtgtgtgtgtgtgtgtgtgtgtatatatatatggcattgtgcagatgtttaaaagtagttacatagactagttcttgcttttcagggtcccataatctaaaccagatgacttcagctttggataaatatatagaaggaaatttaaagagaattcaaaacaatagatgatgcagtgacactgtgaataaatgttatttatacagtttgtaagatttcatgctcattgttcgtatgtcccaggtggagttcagaaaatattcacttcatttccacaaagggaaatagtgcctagagatggttttcttttaaaaagtccttttcataatgcagtgcccttccttccattgcccttcattccattgcttcccatgcttgtcaagagactaaaatgttacttatagtaatagtcactatctcaatgtaaatagcacccttatttgatgagaattattatttcagttctaaaaatggggaaacaaagtcagcaggaggcaaagtagcttgttaaagtattctgcaactttcaaatggttgcttccactgcatttcacgtcttggcacttctaattgagggttactctaaccaccctatttaaaattgtaactgtcccccacccccttaattactaaccctggtctactttttgttttctttttctgtaactcttatcttcttactatataatttatactatataatttacttcattatgtctattgtttattgtctgtcttttccaaattctactgcctcttaccctctccagaatgaaaactagtatctttgtttttgtttactgatgtaacccaaacacctacaaacagtgcccagtatatactaggcccgcaaatatatattggctgactgactgtatggtttagtatcatgtcatagtattgagactgtaactttggtcttctcattttcttctttgtattgtgcgtcctagacttagtttggcctctccttttgtccttgtatactctaatactggataagaattttggagtctttttcaactctgagtcagtgaatgccacataacttagtgactatatttaaatggttaatttacaattttttccctgcaaaggatactgtagtcactgtgagtattttagtattattgtaggactcaagagggaattaaaactacaaaaatgactcgtcttgtatgacacagaaagaaatgtttcttcacagagggaggagaaaaatatcttcaagagagaactaattgaatcaaatcaatgaaccatgtctcatctttttggataagtaactgttagtaatccagacacttcatgagctttcattatgtaaagtctttagcagaagctaaaggaggggcaccaaccacagtaattttaacttaagaacaaaatggagcatgaaaataaattattaaatcatttactcccactatttttgggttagggccaataatggggagagaaagaggtagactagttttgtgtttgtggctattttaatagagtagcacaagtaatcaaaaaacagtaggctgttttgaatttactggctgtcccttatgagttcacagttagattggactgtcctcaatgtactttcttttttttctttctttcccacatctctttatttctctgattttgtttaaacttcataaagagctctctgatctttcctttccaaacaatgaaggtttatcctttgtaaactacctctgtactccacaggctgatgatatatgatatccctatatcattaaagtaaagcctaagcacattctgtggcttttgtgtctactctgttgttgctgagcttatgaactattagaaataattccctcttgcattttcacacatggggaatgtgatgttctcttgggtattatgctaatcatattttggcaggtttctctgaagcagatgcagaaatgatcataccactttccagggtgtattattttagctcctttgacttgggccctaagtctgttttacctgatgttcctgaaagatgttcctgatgtccctcactgttctttcatgctggatgttcttgcctatgctgcctcctcagctatcaccctctcttcccctttttaatgtagaactcattcttaatgatttgtcaaaggcaccctatttcactgaaatgccttctatattccctaccctccaagtggattgtagaccttctaaggtcttttgacatctgcatatctctagcacagcacttatcacggtgattatttatctgttcatctttccaagtagacactctcattttaactccctaccctagtcgccagcatccccagcatagtgcctgtcataaaatggtgccacaatgaaaatttgaaaaatgaatgaattgaacgtgataaacatagatgagaatcctatattctacaattttttaaatgtactgaaattattctttttgaatcctcctatttatttctgtgacttctttggtgacaaagttagaaaaaagtggaggtcagtagggagatatgaagggacgcaggtggaagcagtgagcctgggcgggtgatggagtgggcgatacgtggcacaggggtcagtgagttaatctgggctcattcagagaatggaagttgtgtgccaagaaaactggttggatagggataggtcagggattccctcttgcattctcacacttgggggcatgcgtcattttcttttcttttcttttctttttttttttttttttgagacggagcatcgctctttctcccaggctggagtgcaatggcgctatctcggctcactgcaacctccacctcccgggttcaagctattctcatgtctcagccttccaagtagctgggactacaggtgcctgccaccatgctcagctaatttttgtatttttagtagagatggggtttcaccatgttggtcaggttggcctcgaactcctgatctcaggtgatccacctgcctcggcttctcaaagtgctgggattccaggcatgagccaccatgcctggccgcatgtgtcattttcttgggtgttatactgatcgtatatttgcaggtttgcttttgtgacagacttcttctgggggaaaaaaagtatccttctatctttttacttttgtccagttccaggtatccctgtttttttcttcactcttccttccttgttcatgggagtttttcttgaggacttcaagcccagcttcggagaatcctggttgtgtcatctcatctcctttctgctctcttctctacctaggctttccaccctcacacctcccggggtctgaaaatggaaagataagggtgtttccctgaaagttgctcttctgtgtggggatgacaggttctaaagactcttttctggtccctgccctcattgccatgattaatcagttaagtggcccgaggttttgtaacagcacagtcttaaaatgcttctcccaagtttaatttctctccatttgaccttttaaggatgtgaattggctttaagcagtagactccctttagtacggcactgtgagcctctcagtgaatctgctacatccattccacccacgggtctggaaacttgtctgtttacctttccctaaaaacctaagatatatttttaagaagtgccttgtaacttttcatatagcctttcccctactttgggtagactgtttcttacaggaatttggtagatctttccaaagagaattctgtatctctatttttaaagcataaatcctgtcaactttggaggagaactgatttggcttgagtcttctcagacatgggaacttttgacctaagtttgtattttacattgttgaaagggaactccgggatcccagaaaacatatggactgcaattgggtaaagtttctgtttcagtacttattcctacttactagccgtttaatcttggtcaagtcagccatgtggctctcaacttcctcatctgtaacataaaaggattagagtagacaatctctaacaagtgctataataccactgacaaataataatattagctaatatgtgtaaggcactgtgtttagtgctttttcccttaatacaatagctttgagatataatttatataccatacaatttacttcttaaaaaagtacacaattcagtaattttagtagataggagtaaccatcaccacagtcaattctagaatatttttatacatcagaagaaaccctttacccattatcaattactctccattcctcctaactccctcccagccctaggcaactactagtctactttctgtctttatttgcctcttctggacatttcatacaaatggaaacatgcagcatgtagtaatttatgacagcttctttcacttagcatgaggttttcaaagttcattgatgtggtagcatttatcagtactctgtgcctttttatggctgaataatattttatcatatggatttaccacattttatcattttatttatccatcatcagttgattgacatttgagttgcttctactttttgagtattatcaataattctgttatgaacattcttgtataattttttggtagacatttatcttcatatttcttggatatatacctaggagcagaattgctgcgtcagatggtaatgctgtttaaccttttcaggaactgtcagactgttctgaagtgggtacattattttacattccaaccagcagtgtatgagaattccagtttctccacatcctcatcaacagttgttattgtctgtcttttttattatattcgtctgtaatgtgaagtgtttatctcattgtggttttgatttacatttccctgatggttgatgattttcaacatcttttcatatacttattagtcattatgtatcttctttggagaatgtctgttcagatcctttacctactttataattggtttatctttttaatattgaactgtaatagtttttaaaaaatatatcctaaatacaagtctcttatcagataatatgatttgcagatattttctgtcattctatatactgtcttttcacattcttgatgatatacttttcagcccaaatgtttttaacttgatggaatacaatttattttttcttttgttgcttgtgctttcagtcatatttgtgaaaactttgcttatcccacattacaaagatttactatttctaagtgatttataattttaccacctacctttaggtctccgatccattttgagttaatttttatgtgcgaggagggagtctaacttgattcttttacatgtggatatttagttgtcccaggaccatttgttgaattaagtgctgtttttatctaattcgtttaatctttacaataaccatttaaggtgggtcctgttaattccccaagaaagtttaagtatattgcccatattcactcagctattgcatggcaatgctgagagttgagcctagacagtttggccccagaagccatgcttttagctatgaaataactgtcttacctacctcccttcttacctacctatctacctattgacagggaaaaagtacctcaacaatagtcaatcagttataaaaagaaaacactttatttcttttctgttgtggttctgctgaaatgcttctgctttcttgtctgtggttggtgaattcagttagttgtaacattggctaatataaagttagagtcacagtttctattccttatagttgagctacaagggcttcgctacctccctgacaccctagtcaactgtatttagtcttactcatcagagagatcgagttaggggaggatgatcattgaccttctactacaccaccagacctctcaagtttagcagttgtaggccaggggccccattttccccaacaatctaaaactatgtctttaaattttccaaagaatatcttcatcaagagcaccagactaggggcaaagaccctagttcttactcaaggacctagtagatcccatagattctgtaggggtgggcttcaatggctcatcattttctggctcattggtctatttgtaagactcatatttctgtatgaataatatgaaatatgagtaatatgatacatttttgaaatttgagtaaattttcatagtctttttcaggcttcttcagtgattcatctgcttgaatggactgagtaccaaatacttggagaaatataatttccttcaataaagccttcagtgatttctgtcttccatggagtgatttttggctaatgtttttggtcactcagtttatacttatttatatgactgccattgtatttagagaaatcagccatgttccagtgtagcagagcagatgtagaatgccacagtaacttatggtaaggaataaagcaaagtgtgattgatgtgtgtcccactcacaaggctgtaaatgccacaaaagcagggactcactgctgtatcaccagtgcctaatgtaagtcccagtaagtattttgagtgagagagaggaaccttaagggatatttcgaggaagccaaatatgtaatcatactatatttcaaataggagaatgtttagaatagaagctggtagtcttctatttaattagctcaggagtttggtagcaaggaaagagaaagtaagaggcccaacatataaactacaaaggaccacactgtgggcagttagagtgaagtttggtgtactagtttcatttttcataaaagaaaaagtcaagaggaaggaagcaatgctgtaagtttagagaagagcctgatgaatttgaagtgctggtaagcttagttagtaataatgccacccaattttcagataccttttaacatttgtatagcactttactcatgatgtggcacttataattagaaagacaggataggcaagtggaattagcctcattttttacaggtgaggaagttgatgcagaactttagcttaccatgtacgaatagcttgcaggtggtgagattgggacttgatccatatcttcatactttaagttcaatatttttcctatatcctcccccactcccttccccacctggcttggaggccgcctagcaatcattcaaagaaaaaaaataaaaggaacttaaatttaattaggtaatattttatctgttcttcccattagtctggtatggagctggggaaaatccaataccctgtttttttagaacccttgaatatctctgtcccaagtagacatttatcatccctgggattttatttcatgaaaacattttgaaatacttgtgaggtaactatgaaggcatgccattggcacaatgagtcactttcactgtctagctatgcttgaggccagagaagacagagaattggggatttttcatatggtgagtcctgggtgagcagctgttgaactgaagtcatgaagcgggtctattctaataaccatgttctgtgggaacagagcaggtcgtttcttctgtatgagatttcatcattttcatttgttcttcatttaccaggttttgaagggagcacctgtgagaggaatattgatgactgccctaaccacaggtgtcagaatggaggggtttgtgtggatggggtcaacacttacaactgccgctgtcccccacaatggacaggtatgtacagtgtggagaatccaccagaatgggatatggattggtaaccagaggcagactgtttttttaaaatatcagtaacaaatatcttaggcctgctctggaaccagtatgtgaactgagcaggatctccatgctagatcattgcttattgtactaacctcatacattttcctatgttcactcaaagacatattttcacaggtattattgggcagcaactctgaacccagcaccatgctagatgctgtggcagatatgagagaagagcactactgtaagcttattatctgggaaaagcaggacattacctggaacatagtagatgcttaataaatattaaagaggaaaaatttcctgaaatgctaaaataaattgtacaggctaccagagttcagagcctatttgttcacggacagagatctgtcccatcttaatgtcatgttctataactaggcaaagtgttaggcaggtactcttaatgacattatttttatgatacgcatcctacatttgtttttttcttctatccctttttgtacacgaacaaaaatagttttttctgcctctaacattagaagggtagtcttgcttaattttacagcctcttggaagtttctcatgtagtcttaggcaggttgagtgatttacgcagacatttggttctaatttctctttatgtctgtttatctactgaaagtagagacaattaagaactgattaagggactaagagctgggcctttttgagagaaattaatttaatgtggaaacccaacaggaagttagtattataagaaaaaattacagtaccagtagtgggctatctcctacaaagaatcttaatgttgaagtgcagccattactacctggtattctttagtgtctctgaattacttttccttatctgtagcatctaattatttacaatactctttagagctgtagactatgaatagaaaaagatgaaaagcatttaaaaactcaatcacaggacttactggggaggccaaacatttctgcttttaattcccaaactgtcccttttaatactttcccaccaggttttcctagaattgggacttctcctagaatttcttcatggtgtcttgatcctagaacttcacttctaaccctctgtactttttgtgacattgtctcttctagtttttgccatttttctatgatagacttttcagaggctattttttcaacttaaaaaattactgtaaagttaattacatgacatatagtaactggaaaaatttgtgttttttttctctttttaatgatccttacagtattggacaggatgagatacttgttaagaacttgaccacattctgatctctcccttgctctgtgagacagtaactgtgtagtactgaggcttctgatgccagtgaagattaaacaacattgtaatattgttgctggtttttgttcgatactacacttggtttcttgctttgatattaattaggaaggcctgctcttggggaaaacttccccagtgaaatgatttttttattcaaatttcttatcccaggacatttaataaatgcctcttttcgctagaagtctttataagatgtttccgtttttatattttccaaaaagggtggtggagatcatggataagtttaatgtggcagttttatttcttttgatttgctgtctgtcatttagagtgaccttcagttttttttttgttattcatcacaggttttcttcactcatgccaattctttgattcccagtgagaagccttgtttttgccctgcccatcatcaacaggagaaagtctaagatccttcttctgttatatgaagcctttcatggcttcagctctgtctgcttccccagtctccttctcatgcatctagcagcataccctagcagttctctgctcacagttttcctgtacatactgcatagtgcttcacatcctgtgtcttcattgacaccattccttttctctagggtttccttctccactcctcccccatttttctcatcatttttggcatgcctgactcagatcaagtggttacctgcttcaggaaggcttccctgatcttgctccaggctgagctaaatgttctactctggactcccttagtaccccatgtattctcctgtaataacacttaccacgtttgtattgatattattatatgcttgatgtgagggatgtaccgagttatgggggcggttggactattgatgacagcagttactagcactccttacagacctttgttctcagtagcatgtagctgagctatttaccatcccagcccctatcctattgtaaagagaaaaacagaaggaaaattttgtgtcatagggcttctgtttctactgatattagatgtataaattcagattagtcttttctgtgttacacaaattaaagaagtgaatggagcaggaatctagtaggagttaactaatgtttattagcatccaaatactgtgctaattacaatgttttatctgtgtaatctttgcaataactgtattagagatagagtttaaatatccttttttcagatgatgatgcgtattcaaaagggttaaataatttgcccaagacccgtagtggttgggttagggtttgaatctaggcttgttgaactccaaatctttgctcaaatctgtagtcttttttctatataaaattgattttgtaaattatcttgttttattttaagaacttggggtgttttttaatagactgaaaatttcattatcctgagatttggtgatttactccatgtgttttccctttttaagaacctagctggttattttgaggttagaagttaacattatgtgtatgctttagattcagtctgatgctttttcactatacctaatagcctattgcaactttgttcagaattccttttacaatttccacctgtagacttgaagcattaactatttggtctggcttttgacaaaatgaaaaaggaggggttggagtagtgaggtgagaaaatgaaggaaatgaagttgccagctatttgaaaaagaatggataagactatatggctgaaaaaagataggcattaattttaaataaatggagatttggaaatttgccatgcttttaatgagaagaacctgatagttacggctttgttttgtaactacatatacataaaaggcttggtgttttgtagcaagttctacacttcaagatgagcataaattccagctctattcatggtttgatttagggtaaatttgtcagcctccttttctcagaagccttcatttgctattatctctttcttgggatattgaaacaatcaaaaatgcaataaaaagtttattttttcatttgttctgccaacagctattatgctaaacattctaaattcatcctattctatatggtggcccctggtttcatcttgctattgagcatctgaaatatggctaatgtgaattgagatgtgttgtaattgtcaaataactgattttgaagacttagtatggccgggcacagtggctcatgcctctaatcccagcactttgggaaactgagatgaatggatctcttgggcccaggagtttgagaacagcctgcgtaacatggcaaaaccctgtctctacaaaaaatacaaaattagctgggtgtggtggcgtgcacctgtagtcctggtcacttgggaggctaatcacgccactgcacattccaccctaggggacagagtgagaccaagaacctgtctcaaaaaaaaaaaaagaacttcatatggaaaaaaagatatctttttaataatgtttaaatattgattagatgctgaaataatacattttggtacattgaattaaatataacataatattaaaattaatttcccctattcctttttaccattaaatattttagtagccactggaaaatttgaaattatatctgttactctcattatatttcagttggacagcattacttcagatgcaaagatggtctgtaggtattaccattgctgctgctttgtagaagcatctgttctagccctgaagtagaggaatagatggtttccccatggcctgtgggcagaactgtgttatataccccactacaggcgtttttacctactgtggctgtctaattagtgtttgtttgtgccttcaaaaactaccactcttgtggactagcttaagctcagatggaaaaaagaaattggtcttagggagtgggtgtggggagatgatttacttctttatagggaagtgtcttatagggataagcctgaatactggatattcctttaggaaatagaagtagacctgatggttggatgaagatagagcacaaacgtctttattatactgtatttggcctcaggccatcttatcagagaagttctgctctggcagatatccatttaaggaaaaaagggttttaaagggcccaaaatttattagagcagtgtagattaatgttttgtctacatagactgttatttgaattttctttttaaaggttcatttccttcagaattaaagttgaccctaagctcaactcacaaattcctctctgtggctgcttttgactttgggctcacttctggggcagatgtgatttattttcttgtgcttgttattaatccagaaatataatttcagcatgggcttggaatagtgctctgggacatgaagcagaagtgaacaatggaagttaggtggatatgagtcaaagaaaactgaccacactttctctcagctctcctttacagcatgatgagcctcaagagctgggggaggttttcattgctgtcagtgctcccaattcagtaaaaatgtttgatgtgagttggcaagtacatttgccagaggtggtgcatgagctccttgtgtctgggaatggagattttcatgatggtgcttttattttgagctagatcttcctgtctcagtctagcctctagctggtgatgaattattctctagagtaaggcttttctcacaaccatttttctacttttttttttttaggactatagggatggaggttttttgattgagagagaatactacttaattatatatggtatttcaaagctgctctcttttatattctacatggaggaatgggaaaatatgtctcacatttcaatttttctgctgtaagcctgattgtgagaagtataataagcctgttttctgaattctacctcctcaccccaaattcggtttcctatcagttgggcagactgccacagtgctaacctgaagcacccttgccccagatgtcccagagttgattagtggcgctgttggtggaaacaaggacgagtggatagtctagccccacatgcaggaggtgagactgcaggcaggatctttcctgccctgcagtccatgactcagggtgtagccttggctatgttacaggcacgatccagtttaacttcatggctctctaagcccccatggaacggttgttagtaggttcaataatttatctattggacctacttacagatatttattgaacaactactacatggaatatattatgctagatactgtaagagacacaaagaaaaaattcctattttaagagtggtaaaattgactaggaagacataagaaagtccacacataaccacactaggaagcagaaggtgtgtgtgaatgtgaatttgaaagaaacaatggtgggaatggggaagcatctaagtacttggtggggtaaggaaggtgatcgagaagagtgaacttctgttttgagtctgagtaatggatgggaactgttgacagagaaggagaaatagggtagaaatgatggtaagttggagatgagttttccaagtgaaaaacatgcagcagtaagacccaggagctcagaatacaggcagggacgagagactcagggttaccatggaatgtgtcaagtctgtgagggaaattggatggagtgataagaacagaggatttggacccgaagtatgagaaacatccacacttcagaaaattgacgaggaaggggatccaaagaaggaaagtgagaaaaggggaggtttgagaggtgggaagagagctcggccatgatagcatcctcaagttaaagggtacagccttagaagcttgccctgaactcaactccacatgccttggtggcagctcctgtaatattttacttctcttactgcgttatttgttcagcttgcctaagagactatcagcctctggaaggcaggaaactgctcttacttattttgacattcccagaactgattttaacaaaccatggttattaataactgacaaccaggagactcaaatataaatgataactgcaaaatattcattagaatatttgagtcattagaaattttctgaaatacagttttaatacagacaagactaagaagctagattgaggaagttaaaggaaaaagtaggctttggggagaaggaaggggcaaaatgggtttagatcactatgtaagattttgcacaactgaaaaggaagagcgagggagacacaacgcagggttatgggagacagaaactttattcatctcattgaccatagagcttggctacactaagagtaaggcagctcaaagggcgttggctaatgaagtggattattgggaggggtttactcttacagtttttagtggggaatactttaggtaagatgtctgctgggaatgggaaaggaagaagatgggaaagttatagtcagagagtggaagtaccaagtttgagatcttggactagaacaatgagtgtcttgtaacagaggtgtagaatgtgagcgtgcttgtgatatggaatggatgcggaggtctgtaaggttgagaaaagtaagaactcttgactcagatgaccttactggtcctcaacccagatgttgatatcatgcgagacaggagaggaaagagcgagaacataagccacatgcttgtcattctaggaagaggaaattggtccacgagaacgacagaccatggtgtgataatttatattatactatgtcttttttttaatttttaaaggacttcaattcatctatctacttttaatgtcagaaattagaatgtatttattgatttctttctctcgaagatgaggaattagcatacttctcatagctttcactcactcactagactttgtataaataatctgggtttcaatatttatattattgttatcaaatttataaacatatacatattctttaaaattattcttgatatttacaattttataacccaatttataatattttcaacttagttgtatgtgctacttgttttgtgttaactaccagtgcaattatgtcacaacattttcatttctgagttccttattttcattaacattttagctgaataagtatctttgaataattttatttcagaggagttacatgttggacccatttggttagtcaaaaaatgtcttttgatttagttgccttcatacacaagttgtatcttgactagatatcaaattcttgggtcacgaattaatctcatcaaattcttagacattgttcctttgtgtcttctggttactattctagggaaatgcaatgccagttgagtgtttcttctttttcataagtaacactgggctccctgccttctttttcatttgttgtagagttgtcaggaaaacctattatctttgcaattaggtcttcattctttcttctgcaaagctaaaatctctcttgatttttaatctgttcattttttgttttgtgttctgtgagagctctcttaaggttcttctttataacactgacttatatttcttcattgtcaggtcagtcctttatagcttcttctgcctgcctctcagcccctttgatcagagactaatgtcctatattattttttatttctttgtagaacgtaaacatgtctaaatgtcttgagtgtacaggagcagttctttctaaaatgtattagctcctgtaagtgaataattttcccagtgtgcttttcatcaatatcttaagcattacattctccatgttttatgttgtagaatcttttaataggtgccatgttgtttttttccattttactcattctgagcagagtaactgcctgcccatagacaggggaggtgggtgttcccctggatcccctcactctcaacctggctgcagctagtttttcctcctggtgcagtgaggggcttttatgtaaactggctcaacaacccagcagcctaaggtggggagagccagagagtggggcctcctagcaggagaccaaagcttggcaccactttcttctctgtggcgggggtcagctttctgaatgcccagtactggcccagcctccatggcaatccacccagtggctgagcctggatgcttttcagtgctgctgcctccggaatctgccccagatgcactgcagtatttctcattgctatagtggccaatagtggccacaggagcctggactctgcagttcttgaagtttttgttgacctggaggggtgaggtggagttcagtccattctcctcactgcagcagagtggactttctgaaacatgcattggatcgagtcatttctttgctggaaacacttcaatgggtcctccttgtctttggatttagtcccaaggctgtgcatgtaactccctctccagccacacctctcttcactcccctaatgcatttcttataattcaaccacaagaattttttttcattgccgcaaatgaaccatgctgtctcttcaactcaagcctatgctttctgcctgaaatactccgcactccaccctttctctacacactccctcacacacttctcccctctttcacaacctggcacgctcctcccaggccttctcttaaaagttacattctctagttcctctctattctccctactctgtactcccaaggcaataggtatctatgaaagcacctgtcactctgtgtcatcattgtttgtttggttataagtctgctgtttgtaagttctgcaggcagaagccatggctgttttgttcaccattataatcccattgtgtatagtcagagcctggcacattgtgtttgtgtgcgtgtgtgtgtatgtgtacatatatatattttagataaacgaatgaatgaattacagcattaaattttccagttgttcccagcccaacctcatctccaaattcacagctcttcttacctttctaagatactttagtatttttcttcagtgtgtaccgagtttgtactaaatctgtaaaattagactaattatatatgaagactatagttgacaatcaatgtaaagcacatatcatctggaacctagaaataactcagtgcatatgtttttactgctgaggttagtagtgacgttggggaataaaaagaaaacccgctctttctcccctagtttcctgtcagtggcagtgtttagaagaggaggactgcaggagctctaccgcagagggctgactgggctggtgtgtttagggaaaactcaggtttcagtcaaagaaggaagttgtacaccttaatgtagagttgcccttgaggcgtagttgaaggattagtgggcaaaggcaaggtgaatctgggtgtgatacaaatgagatagagttcagtgacacaggaaggggactgggatgaggggtttgcgtgtgaactggtggtgtagacaagggtgacggacactttgggtaggaacagaatagagatactgttgctatgagaagggtgagttgaaagataattattattttgggattaggataacttaaataagagaaccttaagcagataaacattcatttaacgaatatttatttaagcttgggattgtgtttcatgctggggattcagtgatgaggtaaacagctaccccccatttcttcatggcactgacagtctagtgagaaacacaggcatagacaatataattctccataaaattttgaactgtactaaatgccttgcaggaaacatagaatgtatctggagagcatattaataggcagaactaattgtgtttagtgacaagcaagtaaggtctctttgagaaagtaacattttccatatagacaatgagtaggagttggggagagtgaggataagactatcccaggcacaaggaataacgtgtgctagccactgaggagggaaagaatgtgatcattttgagaaatgaaaaaagcccagagtggctggagctagtgatatttcatggttagagcctaaagagataggcagaaaacactggtaggtgttagaattttatcctaaatgcaaaataattcatcaaaggatttgaacaagcgagtggcgcattctactttacatgttaagatcatcctggcggctctttagaaaatacattggtcatgatgcagggaaaccaggcctttgagaagtcctgaaaaagatgatgctgtctagaattagtggaggaatttcttgcatttattctgtgtatgaatatcctttccacaactacattatccccttagccacatctatactcccagaccatcctctcagtaggcaggccctgtagacagcagtgtttatacagaatgtttcacccaactttattccgagcaggtgatgggacactcaagcttgttctttgttcttcagctccaacttcagcagcgtgatagaaagtctcctgtgtatggagctgaggttttgtaggatagaagtcccaggaatgatctgctctgacacagaaagagatgaaactccagaactcaggggcttgggtgactgctggttggaaaggtatataggagatggagctctcttgactcagccatagaggagaaggtagcagactcagtgcaagggccagccaagctcattttttatttgttcctcttgtggagattgttgttgcaatgagagttgacccttaactggaccagtaatgtgatcagactttttcccacagacttcacagttgagagatgactggaaaggatgagagtcgaggctcagcaccttacttttttcaattcctttctcttcttttctttctttctcttgttgtccccctctattttttacccatcacttgtagctccaaatcagattagtggtttgtgggtggggcccttgccttgagagagccataatgagctgtttgtgtccctgcgtgttacagctcataaatgctgactgtttcatggtctttggctcacttggctgaagcgtggtgctaatgaggcccaggccatggtttctatttcagcacagacctcttaggttcaccctgttatatttactgccacaggctgtgtccataatttttttttttttttttttttgagatggagtcttgctctgtcgccaggctggagtgcagtggcacgatctcagatcactgccacctccgcctcctggattcaagcgattctcctgcctcagcctcccaagtagctgggactacaggcatgcaccatcatgcccagttaatttttgtatttttagtaaagacggggtttcaccatgttggccaggatggtctcaatcccttgacctcgtgatccacctgcctcagccttccaaagtgctggaattataggcgtgagccaccacgcctggctgactgtgcccataatcttacttgttcagcctgaagccagaggatggagcaacaagaaaagatcagcatggaggtgaccctactcctgcaaaaccaaaacagtatacttcctttgctaatggtggcttggtaatgccatgtcatcttcacttgtagcactctgagtttcttcctctttccctacatccctcaacagtcagctcagattggccttctttattttgaaaactaacttgatctgcagcaatctcacaccccaaagtctttatcagcactgagctattttcacttctaattattttgccaactaactgtgcaaagttgggcaagttgctatacctctcaggtcctagtttcctcatctgtaaaatgagcatgttagattagatgctgtccaaggtcagttccaccactgacaccaagtgtctagtacagtggctggcatagatactgaggtgaatggcagacacagtccctgccctcctggagcttatagcgaaatggggaagagactgtaaagagtaaataaatatgaaatcacagctcgtgatacattccaggatggattgaatggaatgatgcaatggtggagaatcatgaggagatgtgcatttggagacctactctattgataagacaggtacctcgccatgtgaataagcagggaaaaaatgtttcaggtggacagagcagcttatgcagcagcactgaggcaggagagaacttaatgtttgaggaatcaacaaaagttattgtggttagtataaactgtacaaaggagaggtgtagatttgagtatatttacgaggcaaaagtgatcaaccagaaaattgtcagtagttacaggtggcactcagtgtttaaggtatcagccaaggatatgctagtttgacatttcatttcagattattccagagtcattgtggcattagagagggtagtttttaaaaacaagttatcttctttctcttttgcccataggaaataagagcctaactagtccactgcctcagtcctgatgttaaaaaaatgacagtagcctgcaatatctggcaggtggaaattactgagagggataattattgctcttgaaaacttgcctaactgagctttgtgcaacattttgggagttcaccagcaaagtttgtgtgttgacacaggtgatgatacatgctgacacttgtttgtattgaagatttagtagcttggtaggacatggaaacaatacagctctcctgtttcaccaaaggcttttatttgctaggtagcctataacttagtgctctctcctgctttccctactaacataaagtcatttgcttttaatcccttctatgttctattggccaacttaccttcaaacacagtatcgatcatgtctttcctcatcctcctttacttgttgtatcaagttccgaattcatactcgaagtcaaagcctcaatgacctcccactttttcttcttctaaaaccccagccaaagaatacactgcagttattttaatatgtttaagacttaatcctgtattcctctgtaaatcttcaaccaccagcccaggctggtgctttcttgcaccagtgggataagctcaatgaccgtagagcatacacgttaagacctctaggtgatcgccaagaacttttcccactcaaatatctagtgaccttctgcctttattcctttctaatacgagtgttccttaactgtcttatgcacctatgccttctcagggtgctgtaagaccctgggatcagcgacctcatctgtagattgtgttgatcacatccagggctgaatactcaactctgctgcagtcaaagagcatcagatttgcagtcagatcaatccgggtttcaatgcagcactctcactcaccaaccgtgtgaactttggaagattttatttccttttttttaccttcctgaacctgaagttttttatttttagtctttagcattggttttctcctgtgccaggagggtggtgacgtgaagggagttgttatatcatagcagatgttccactgggaattttagaataagcaagttttatggccaccctggttactgtttttcctattctgaattttagaaccagttgatagaattttaatagggagaaaataatctggcagaaataggactaggaggaaatgtgaatttgtagaaatgtgcctgaaccttagagaagtgtgatccatccagtagctaattacttataagccactatcttcttggatctctaaatttcctgtccctaacaagcactatcgaacagatgcatggtccaaaggtgttcagtgaaggcagctaatcttcaaaattcagtctcattcaaaaatcagtggactgtacctaaaaatacatttcccttttagacaggagtttgcagtcacaagtgtttccagtaaccaattgtttgagtcatgatttgagtcctcacctcctccatcctgtccacttccccatgtctgtgtgcccttgggaagcccgagacatgcagagatggcttgatatgttcaggttctcacctcaggtctttgttaagaattttagagtgaggcagctccagttcaaatctcaactgtccttcactcactggcttacaaaggcaaattattttacctctttgaggctgtttcctcagatataaatgagacaatttttatgggagcccaagcacagtgcttgcttctcagtaggcagtcaatggctactggtttcctctcccaagagtgccacatttcctttcctttatttacctagtttgtcttgctacattatttcagtgtctgtttattatggtgcataagaaatgtatacaaaatagctttaaacacattgtgtcttatagtacccaaaattatcacaaagcctcaataaagaaaaatgacatctaaattgttcacattcagcaagtcagtttggttggtgggcagtggatatttgagttagcataagtataatagatgagactcagcaattttcatgttgcagtagctcttcacctacttcttggtcatgttttcatttctcaatcccacctgcatcctaataacacagctgtcattactttgaggtaccatttctgctagcactataagacagcaaagtttctgtaataaatgacatcatctaccctgagggagattattgccggtgagctcactccctccctccttcactctctgattccttcactcactcactgactccctccctccctccctttcttaccttcctccctccctttctcacctccctccatcttttactctctcacgcattccctccctcgctcactcactccttgcaatcactccctcactcactacctcagtgttctcactttcttattcatcttctcccttccttcctccctcatttccctcattaccctcattacctcccccattcactccctcatccctcactcactctttctgtattaatactttgggatgcagttgacacagcctcgtttcaaattagaaagacctgttgcaagaggcatctctcagaatggctatgccactgagtaggcttactagtagttgggcttcagtagcaattggaaccaacaacttgaatgccaccatgtttttttctctttgtgcacatcttttctatttttctttttttgagacagggtcttgctctattgtccagactggggtgcagtggcatgatcatggcacaagtgattctcctacttcagcctcccaagtagtgcctgcaggctggtctctaacttgtgggctccagtgatcttcctgtttggcctcccaaaatgttgggtttacaggtgtgagccactgtgcctggctctctgtgcacttctgattcacccatatcactttctctgcagaccagcctcctcatctttttggtctatgtggcaaagtggtcctactccaataatttgggagagatacagtgatgtagcttggatcagatgcccatcttgggtcagtcagccatggccaggagggtttgatcatgtaaagacatggttgctccttcaagaattatatggctggagttaggagaagagcatggaagggttatgccgagcacggagttccggagacatccacatacccatcctgccatcctaggcagttggctcttgctgggaatacaaaagaacccctctaaactgcagccaagtagtgggagacagatgtgcaaccaaataagtgtgatagagtgatattggttctatagtaatggaggtacatgttagataggaataaagaacaggcagtcagttaggttaagtcagacacaactagcatccgcgagtaatgatggctaacaggccttctacagatacatgagccagtcaaattgctaggtattctgggtctagagatagccttggcattttccaagcacaaatattgtgttctttttttattaggaggcctctttatcagagtgccttttaaaattatttgttgagttttatttacaaaggaagaatgaaggacaccttgacatatttttattttcaacaacttgtcatgttttagagaattcggatgatctaaattttagttcctttgatagctctctaaactgtttttaaaagacctcaaacaaaaccaatcaccactttattttatagctcatatgatctggccctatactgtttttgttaatcacagattcctggttgtaagttgaagacattatcttgttctttgttaagggatgtaggagcctttgccttagtctccattgttgctatagtggtgacctgcaacctagccagatgtgggctcatgtttagcttcctttagtgtgatctttttcaggcagtgcataccagtcctttttccatctcctagtacattgggtggactttctttgtcttcttccacaaatccccatcctttaagtatgggtgcctcaggctgagcacagcttgctccagtctcattattcttggccttgcccttcacatccatacttcaccagagattttcaacatctttcatgtcttctctgtaccctatgttgcttgccctaacattttcaaaaattagactttttattttcagatacttgtagttttgtgcagttataagaattaatatagaaagatttcctgtaccctttatcaagggtctcccagtggtaacatcatcttatggaactgttgcataatattacaaccagtgtattgacgttgatacagtcaagatatagaacagttaccctaatgtttggcatataggttccttctcattattttttcttactcatttttatactcttctctccttgctcttcttacttatatgttcattgacccagggattagttaactcgagggtcctacaggttttaccttctctttgataagttggctaaaccctaatgttgttagagtttctaacggtagtaactattcatcttgaaacgatttgcctggaaaaaatatcatttagatggctcaaattggccttaaaattcatgtgaagacccagccttctggagctctgcttgccttaatttcagacaggtcacatgaagatgaagagtgtggggggctggtatggtactagtcctttgagactcaagagccctaatcaaaagtaatttccccctaaaaggacagttctgcacagaggatgtggatgaatgcctgctgcagcccaatgcctgtcaaaatgggggcacctgtgccaaccgcaatggaggctatggctgtgtatgtgtcaacggctggagtggagatgactgcagtgagaacattgatgattgtgccttcgcctcctgtactccaggctccacctgcatcgaccgtgtggcctccttctcttgcatgtgcccagaggggaaggcaggtaggtagcagaaggacggatctagaaacagggaaggggcagggggcattcaggactctgccttctctttcatcccaaacagcatattctttgagttaccatctatgggaacatatcactcaggactgttccagaaatgtaacctgctagccaaagtgctatgaagataatcttcctctttaggactttaggctctcttctcaactctacatactttagtttttcattccaaaaaaggaaagttagtaactattgtctttggaacatctgctgaagtccttaagatcttagactgaaaagcacctcagctattaagataaaatggctaataaatggatccacaggcttcattttaagaagaaaccatctatttactcagaagaagttggcaggagagaaacatttaagtgccttctaaccctcaatgtctatgaaaatattcccctcagggaagatttttacatgctacaaagttaacattgctctagcctctcaatttaacaactactagttctaggagaaggagagcaatgtaaggaggaaggtgatgggagaagataatttagctgggagaactttctgcccagcagttttgaaatgttctttcatggaggcctttccaaaagctctagctccagctttgtggaagaagctttagttacctcttcttaagttaattgcagactggaaaatccagttcccatgtgaactatataaaacaggaagcctagtaatatcttcagagacctggggccacctgaatcaggaatgttgatgctattaaaagattactctagtagaggctgatggtgttcaggtggccccatgatcatcaggtagcataatattggggaagtaggattccggataaaatataggatgtatggaatatttgagacatactaaaaattacttcttgtttatctaaaattcaactggacatcctctattttatttgctaaatctggcacactatctggaagatagctccactttcctgtctccgtcttcttatcttctggcctgtagatgtctctgtcctggaggagaggtctagctgagagctcagggtcagagtctagggttgcatctaggtgctttgctggtggccaagcatgtccccaaggtagggtcaggcaaagcagaagttgcgtataaatctccatgttggattctgaggaactgatcatgaggttttccctcctgggtgaaagagaaagctcttccccaagtgagagacattttctcttagttgtcctttgccccaccctgtgacaggtctcctgtgtcatctggatgatgcatgcatcagcaatccttgccacaagggggcactgtgtgacaccaaccccctaaatgggcaatatatttgcacctgcccacaaggctacaaaggggctgactgcacagaagatgtggatgaatgtgccatgggtgagtaagcagaactttttctgttctgtgaagtgtctgttgagctcagcaaatgtttaaactgaagcacattttactgtagaagcaaattacatacacccaaacctcagattactcttgctacatggccagtgtttacaagtgacctttcagcatagccataaccatatattccattctggggattaactgtatgaaacgtatgtacttgattcttaatataaagccctacctcaatgacagtttgggcagaaactgcaatagcagaaatgcataacagttgaggatactccgcttttatttctttttaaattaaggaaaaaaaaatagaaaattgggaatgatattattgaaggcctggccctgatgctataaccatcagatgctcttctattgttcacatttgtggaaactcaactgctttgatcccagtaattggtacttgtgtctttcagccaatagcaatccttgtgagcatgcaggaaaatgtgtgaacacggatggcgccttccactgtgagtgtctgaagggttatgcaggacctcgttgtgagatggacatcaatgagtgccattcagacccctgccagaatgatgctacctgtctggataagattggaggcttcacatgtctgtgcatgccaggtaaatgggcccatcagcatgttgggtctagagaggagggactgttctgaacttctcttggtagagcattcagtatactattgcagtctgatgagctctgtcagcatttgatttcctttgctgactggggactagaggaagtcagggttcacaagcaaaccttccttactcaaagagtaaggcagtgctagaattcatcaagctatgtagaccaaattaaacaagcctgttatatcaaaatccacatgtaatagaaaatttcaaaaatgatttactgtaagaatcctttaaatagcaagttttcctgataccttcatgtaattacaaataccataccattccatttatataaataaattttatccacaattatataggaagtttccatttatctaaagtgcagtacatgtttagttgtattctggagctcttctgcatagaccatgtctttaattttgagaggatacagccaaatccagcttgaaatgatggctaacattggctgctctgcctgattaaggctgccggccactccagccttgaaaggcactgctgaccttgaactgcaccctgaaggcaacaacagctccagctcagcttgtctttaggaacatagagtggggacattttgggccttccacagtccagaaagtatggatttatcacagaaaatgtggagcagtccttgtttatatgctaggtcttgccaatgtcttttaatgtaatcccttcccgcttttcacagtgacatgggtatttcacagtatgccctgtcctgcttgacacttggagtgactatttctcatcatggcagagttccttttttctctgcagaaatgtgtgtactcgcaaaggatgtagttatcattgcaaatttgtgcttccttgtctggaatacacctttctctctctttaagccacttgtgtggtctgttttgtttaggtttcaaaggtgtgcattgtgaattagaaataaatgaatgtcagagcaacccttgtgtgaacaatgggcagtgtgtggataaagtcaatcgtttccagtgcctgtgtcctcctggtaagtgcccacgacctggccctgttttctcttaaagcacaaagccaactgaccacagggaagagagcagggagagaatgtgtgtgggctgtgcatgaggaaatcattagagtaagtgcttggtgataggagtgtgtgtgtacagaaatagagaatttgttttagctactatatcttacaagtcctttgtggccaaaagtccaagtctattcttgaatggcccatgacctcttcgtctgtgtatatatttcagaatgctcatacctcacagaagccttagttgtaggctattcgggattttatttttttcccatgggtcatattcttgaaggccctctgtgagactgttatttttagacatttcacccatgagttcagaaacagacaacacatgccaatttttccaagattctctgtctctccttttttttcctcaagctatttttgaagatatgccaaattgtcctccatagattgcatcttaccccattgtatcttcagagagaaggtttctgttgcctctgaagctacagttacttgtttgaggttccacctataaatttcacttcctacatccttcatttagaagtgaagtctgtctgtgaagaagcaatggtagagacacaccacaagtgcctctgattccctgagtgtcacctggttattccagttacctgttggggagaataataaagcataggcttattgacccattggtataagccctgctagtaacctaacatcattctcatggtaaagggagacacaagataatcctttgactcatgttaccactgtccctttttgaggtttcactgggccagtttgccagattgatattgatgactgttccagtactccgtgtctgaatggggcaaagtgtatcgatcacccgaatggctatgaatgccagtgtgccacaggtaagattcttctcacttttcatctccttggtaggtccatctgaacaaaatagggtgattgtccctgtcctctgctagctgctgtgccaggccagtccactcccagaggctcctctgtgtttaggaagagctgtttctaacaaattttttgctgctctctttttctgcagcacctgcctcctccaccacaacagtggtctggcccagatatttccatttggtatccatgtctttctgggacagattttggcagcagtaagtttccagctggctagattgactcatttaggaaagagaagaaatccagttgaaagctatttttcactggggcttctcagcaggaggcctggctctgtgtttcttgaagcaagtgactgaaagaaggcccagaaatttaaaggctgaatgtgtacaagtgcaggggtattctgcataaaagacaccaaaataggattgagagtcaagtgtgtaaatgacaggagagagagctctcactgggaaagtttgggtcctctttgctgacttctgcaactagagtcaaaaacgatctgtgcacaaatattctgcatttctgggtttgtaatcacattttgtacttgggattggatttcagtaagccagatgttccctattacacatttccttttacacaggcaaatattatacagaaaggctagaaattattagaagtgaacttctttattatctgactgcttgagaaagaagttatttatgtaattcaagacattaattttagagaatggagtcttaaagattaaaggcatcatgcatataatttatttctgatcacagaaaagcaaatttaattgtgaaaattaatacaaaaagttaatattttaattattagacctacttagtttaggacaactcagatgagccactttctttctttttgcaaatagttaatgcttgtcagagaatccagattttgtcttcccctggccagattcttcttgtagaggataagtttcaaagagattaaaaacctttagctcaggtttaaaagtggggggaggactcctggagtcttttagggaaagatataatgtttgtctatttacacctcgaagaaaggaaatcttacttgtctctttttcttttaaattctcataacaggttcattcattttattcaaccagtatttatttaaaactactatatatgcatactactctcagaggagttgagagaagtaaaataaagctctcttacctccaaagtcagaattggggacataagatacatgaaatcattaacctgtatattggacttgggaagaaagaaatacaaagataaatatataaaggaaaaatattttgagctgttatacctgaagcctagtaagaaatgaaggtgcagttaaagcatctctgcaatgaaattattgatcagttgcgaaggtatttcaattctaaaatttgatttggaaatctttattttaagcacctctctccaggcatactttctaaatcaatgcagatcgtcgttttctactgctcaagacctgcagtattaattgaccacacatcgaatgtgtagagtaaatggatgtagctacacttgtgttctggtgtggaatatctgccttggtctttgagaatccttgataaaattctttccaaaggtttcactggtgtgttgtgtgaggagaacattgacaactgtgaccccgatccttgccaccatggtcagtgtcaggatggtattgattcctacacctgcatctgcaatcccgggtacatgggcgccatctgcagtgaccagattgatgaatgttacagcagcccttgcctgaacgatggtcgctgcattgacctggtcaatggctaccagtgcaactgccagccaggcacgtcaggtaagcccactctgtttatgtttggtatggggttttcactgtttctcaaatctgtttacacagatgtttcagactgttggcatatgctcagatacctaaaaaacagtcctgattctgagaagcacagccaaagccacaaacataaatgtctcaaggcaaatggccctagccagtggagaagtcagagacaatagctctgccaatctgatgattttgtgtgtgtgtttgtgtgtgttttgttaaatagaggcataccacttcaaaaattaaaattaatgatttaaaattgaaaaccctcttttttgtggctatattatctttttttctttaagttccaccccacccagattaataaattcagtccttccttccttccttccttccttccttcctacctaccttccttcttcccttcttcccttcctttaatgtattttctctttcacagttcagtctctttattgtgacatgtttcttcagtcacttgtctctggtggggccttagccatcttgggggattctaaggaagaggagataccttacaacacaccacagtaactaaagtagaacgcagagctgtcatttcctatcctcggagttcatcattgttctctgaccttggttgaatgactccttgttggtcgtgaggacatgctgctcctttctggggggatgtggaattattttctcaggcagcagcatctcacaggtttggatggttctgttttacttattagatgaatgattatggtcacaactatggttagtggacagagatgtactatgttccagatcaaaggaaaatgtattagtggaagattaaccaatgtgtgcctttgttagaaggaaacctgccaatataaaggagtgatttattgagaactcattctggatgtaaggaaaatgacctatgtagagagcagaggtggagagggtagttagctaccctcattttcttttactgtttccaaatccatttcttcaaatttgtcaaaggctctggtctttacccaaggcttcatacatgccaagtttgaaaacaaagtcctttttgaattgctcaagcatacgaaaaacatcccatgccgtcacagctgaaaatgcctttccctccccacatttagataactcactaaaagggctgaatagatctttgtgaaaacttccaaaagcaatttgcttccgggctgttcctcagacatgagaaattatagtaggaaaagaaatttgagagatttacaagcaattgactggatgtctttagaatcgaggggctttagactttgctatcattcccatcataataaacatactggaaacctgggtgagtggtgggttggcaagcactttgttttctctggcattatatcattataccaggatatatcaggtgttttctggggaggacagagagggtatggtataagtagctgtcactgagaaggtgagaagtcaatatgagtgatctgtaggcagcatggaaaggaaggcccggaatctgtcagaacctgccaaagatgttcctgcagttatttggagaattaaagcaagcaacggtcagacaacattaaaaaaatgttgatctgtaatgggtggagaaagacctggcatgtatcagggacctgggtggaaaatccattaaaagaggcattatgaatagagtctgaagttctagagtaagaattcctgttccacttatatggcctaagttggtagtttggtgtttggataggggagtggatggaagaaatattttacagtttgtcagctaaaattgtggtagtcactcactgggtacttaaagtgagatatactacccagagttaccttcagtgcgttctctcatctgtgcttttatgatagtaaagttttaagtaagtttctttgtgtttcaagtaacagaccaacttgagctagtttaagtcatcatttacaaaaaataaacaacaacaaaacaaagaaacagaaagagcttagcgaaagcacccagagcctcttatagattccaagcaattgaataataaggctttggagaaaagaataggaaactgggcatttgtagaccagaggtcacacagtctgtgtttcagtgttgtaatgagagaatctcattggcctggcttgatccaggcatcttttcctactcaaataaaccatggacagggggctggagtcacattggatcatcagggcttcattgggagggggtgctgccttcttagtttgagggtaaagcagggttgtcagtcaagggttagaaacatctcctaaaggtatccactcctctgcagggaatatggaaatctttccctcatttatggctaattaggcagtatagcctcattaatcatgggatgacagtacagtgtggtggaaagaggatgctgtggagccacacaaacagggttcagagcccagctttcctgccctaatggtggcactgtgcaggtcagccctgttgtctgtaaaatgggtgtaacacagactaatgtgcagggtgggtgacagggttagagaaaacttacatgacaggcaaagcagcgtactttgctcatagaactcaataaactgttcctctgtaattattattaataaacattattgcagagtatgggcacagtggctcatacctgtaatctcaacattttgggaggccgaggtgggacgattgcttgcgcctgggagtttgagaccagcctgggcaacatagcaaaacctcgtccctacaaaaaataaataaaaattagccaggtaaggtggtacacacctgtaatcgggaggctgaggtggggggatagcttgagtcagggatattgaggttgcagggagctgtgctcgtgtcattgctctccagtctgggtgacagatcaggaccctatctctgaaaaaaaagaaagaaaaacaaagtatgagtgaatcacaagtatggcattttatcctggatgttttgttttcttatattctcattaccagtttttatttttagtctttttaaactaccaaaatattattctgtgatactcagaaagcatcactaaattcatacaaaaataaaaagtaaatattgttaccattatttgtaaagagatatttgtgaaatatattacaaatatatttcacaaatatctctttacaaataatggtaacaataatgattgtatactgttaatataaccaaactcttccattcatctgggcagtagagcaaaaataaggcagcttacctcaggaggaagttactagactcaagatttatcctgaaatttagcctacaatactgacaggcagtgtcaagctcacagtgatagatacaaattccaaaatcctaattttgatttgaaagcttaagttttatctttggcaaaaatactgtcaatttgcttttcctcaaaatgacaggtttgctgctttcacttaatatttgctaaatactcaattctgattaaccctggtttgcctgtcagttgctctttcaattaaaatggggtttcatgaagaaagcagctatttcaactcacagctcaaacaatagcattatagctcttcctggagacaactctcatacttggcatgccacagaaatgctttatgtatacttccatttcatcacatggagtagtagacattactcaaggttcgagatttattaaaattataaagttactaattttaacttccaacaaagccactcttgagtgaaactggcgtttttgcttgtttaactgtggcatgtggaggtgagcagtagaataattatagtacagtctggttctactgccttgattcatgctgatgtgatcggtttcaccccattgcctctgcaccatcagtttgaatgttagcacagtgaaaaggaaagatcatggctaagtatgattaataaaatcctttggacctcctgtatcttcctgaacgagtctgtggactgcattttgagaacttctgctttattctgtccagggttggctggaattcaccttagatttcttaccacgttgctgcatcacaagcagaaagccttagtatttctgtggtaacattgaatggtttccgttgggttttctcttccaggggttaattgtgaaattaattttgatgactgtgcaagtaacccttgtatccatggaatctgtatggatggcattaatcgctacagttgtgtctgctcaccaggattcacaggtaaagctccttttactgcaaggcccctccttcagccctatcactttgggaatatagcatccaaaggaatattgcttttcaagtgtttcctatttctttgtcactctggagggttagtagtctgtttctctgcttctctagatcagttttctgttcacagaccttttctaaactgaaacatacttttcattaattagagtttttcgattatgtgtttatttgctgccagaaaataattcctagacagaccataaattgcctttgctttgcttgagttacattgcttccaaagctatgtttattgattacaggtagtagtcaaggccttccgtaaagacatattcaaggtaaaatcttatgaaaatactgaatgcttgcttctgggtacctcctctttgacatactcaaggtagaattctgtgaaaatactgaatgcttatttctgggtacttcgtcttctgaaatattgttggatgaggtcagagcttggggagaccaccctaatttgggtagcatgagagagatctttctgcccaggaggaagaaagtaaatggctagaagaattttgaatataacttctcttaaagtatgaacagcctaggcatttacacatacacacatgtgcgtgtacatgcacacgcacacacagacacacacacacacacacacacacacatcttctctctctttacttgtcaatattacctttatcttttaccctcctgatcaaaaagtgctagaggctactactgcagaaacctgaggcccctcactgacacacctgagtttcttcttggcatcatcagaaggcacacactgtacattctgttcttcctggacagtgacacacagaagcagccactaacatgttaccctttaataatttccatgtggttgtttgtactcgaatgtgagaaacacccttcagagtttttgatagagtctgcagaaagcagccagagcaaagtgaagtgaatgtccaccattcatttgccaagaatgtactttgttctctatttcacaagaatttctcctatttggtatgattgtggacattagaaaggaaagtttgcacccaaatgggtcacagtgatccctgttcagtgaaagatcactgagaagcaaaatctgatgaaaactgtcatacccaatgcccagtgctgctgtagtagcctgatgttctgcatcctgaaacttgttactccaagatcaagtggcagtcgagtgaatacacaaaaatccctgctagataggataataggtacattgttgataagtgggtaatacaaagagaataggtaacatttatgaagaactaattttgagctaggcactaaattgtcaattgtcaccgacgttgagaatacctacagaataagaaacccagaacacagagatgttaagtaatgttaccagtgcacagcagccagaattacatcccaggcaatctgacccctgagcccatgctcattcccactacactggacatcctgattaggggcctgttgtgtgtgtgtgtgtgtgtgtgtgtgtgtgtgtgtgtgtgtgtgtgtgtgtgtgtttatataaggcttctactggactcatttttttcagaatgccaatgaatcatattctttctctttttaatattcagcaaaccaggaaggccaagaagggagaacataggctaaaaatattctaaaataaacctaaggtgtagcatgaaaccttataagcaagaaatggaatgttttggttactaggtggtcccctgttcatggaactgttgcctatgtctgagatgatttttttaatcagctgctaaaaacattagagatgactgtggtatatactcatgagtggtaaatgtgaggagttttattcttgctcttgttttattttaatatatttttcccatatcattctaataatagctttgacagctttaaaggggatttttttgttttaatactaagttatctgttctcttagaacctttttaaatgggggaatgtaaggaattatgtgatacttctataaactgcttttcagttttacaaagcaccttcatgcccattatcttcctgaattctcataacaatccagaaaggaagttctactatacccgtttaacaaataaggcaactgagagacagaccttgatgtatatactcatggcctctgccagtgagttgcatagtgaggactgtgagttcccagaaggcagagacctcgtttaatcatctttatagcaagtgtctaaagcaatgtctggcacgtaggaaacgcttagtgaatgttgctgaatgaacgaatgaatgggactcaaatatagcgcttttgctagctaatgccagactctgaagtgtggactataccatgttttcatttattaaacaccaatttattgagtgcctaagtcagaagaaacactgggtaacttctcattttagttacctagcccaaaaaatttcttggccttccactggactttcctcatgctcagtggaaactccttgagggtaggaccttcctgatggaacagctgtcaatcaacatagtggactgcatttaatgctttcagataaagatggcttgaaaatttattctgcaaagaataaatttaaaagcaaataaagaaaacttgggaggagtggcttctgaggagacgcttccaagaaaagaccaaaaatgaagaaacctttttcctgttatccttcactatattacgggccgaggctaactgtgtggttgaagagctctggttcatattttggtgccactgacaaacagctcaaagaatcagtggttgaggccaaggaaatagtatttaaaaataagctattaataaaacacttaagaggaaaacagcagccacttccagattatgggtttttaccacaagaaccaccaatgatggtttagagagcaatggagggtgaaaaaatgtgaatactcatacttcataggagtgggtatctgtttcatttggaatgtcctattctaaatacaggattgctctttcttaaatgagaaaaatgcatgttttcaaaatcagaatcagaacattgtgttctttgaaatatataaattcatagcagttgcttgatgccactcatttatagaattataggtaattttaacatttcatatcattttggaatatatagttaaatctcagttactcaaaatgtaacaaatggaaacacttgtataactgacccgtattactttattcagcctaagaaatatcaaggttatagcagacatctttttaaagagcaatcttggctatgtcttggaggagcaacatattcacttcaatttcacttactcccagtatccacattgtatgatgatgataagtaataattgtctagaacagaatttctcaaaatctagtttttacaccacctacatttaaaaaaatatggtttgctagattctattcatcacaatctatggtgatagggcctaggaatctccacttaaaataacaacttaaagtgatgattttgcacattaaagtttaagaaccataggtctgcagtgacagactgcattattttctctaatatcagaagacaacaaaattatactttgagactctacttcctgaggtcaaaaaaaatggattaatagactctaagaatgaaaacaaaataacctttctttacaatcaatttaattattgaattaagttactagcccattcattaagcattccagttaatttggatttaccataaatagaaatgtaagaggctgagaaaatgaatttgtgctaaaccggcacaaagcatgttaatgaatgcttctttgagttgtactcagggcagcattaagaagagaagccttctttggtaacatttgacattctcttcttagaaccttgtgaagtttccccatttctgagttgaaagaaaatgccaaattgctataacacttttccagccttttgttaactttccttgattatcaaaagtcaatgctctttgctcctttgcatggcattaagtgttattgggtgtctaattccttacatcttgacatttggtgcctcaaggcaccttatggcctgagcagatgaaggatgtcaacataacgtgtcttatagttctgggtctatttcctaagcatttaggatgtgactaacactgtcccccttctccacagggcagagatgtaacattgacattgatgagtgtgcctccaatccctgtcgcaagggtgcaacatgtatcaacggtgtgaatggtttccgctgtatatgccccgagggaccccatcaccccagctgctactcacaggtgaacgaatgcctgagcaatccctgcatccatggaaactgtactggaggtctcagtgggtgagtagctgccccatgtgatagtttcttattgacctgtgttaagccagttggcttgtagtactggtgacagcctgaagttgtcaaatggggctttgagctgaaactttgctgaagatttggtagtctgcatcaaagccttctgaattaccatttaatccatggaagctggcccctcccttccataagtgaggacctagatggaacataaggaggaatgtctcccttatatgggtcattagcaaggacctcatgggaggaacccatactcattgtatgaatctttggcagttatgtttttagtatgtattactggaatgatttctgaagaatgttctagcttttgattttttttcccctgcttaaacatagctcagctctgttctgtcacagtgccagtgtgtgctctgaagtagggccgcttcagccaactttagaaatgtccctgataaaacatttgcaatttttaagccccacagacttgtgtgatgtgttagtgattttctagaatcatagagtgaccttaggtctcacgagacgctcttatactcttgctgcatttgccataggatatggctttggacattttcctttgccaaactttgaaagatgaaaggataaagagtgtttagtggcaaatagtaaataaagttatttaaaaattaattaactcagtattggtgtttcagagtatagcagccttcaaggcacccttatccatctctcattttcttaaaattctcccgataagaaagctatcatttcctgatatcacattctaagtgttagtgatgttcaaattggagattatatttacaattcaaataccttcattcctgtgccttttcctgcagaataccctaggtgctttctgaagccaagtgttaggtcaagacaaagcatgacttagatatgaaatatcccaggagcatcttagagtggctcagggtccctgacagtgacctaggtatctatttggcaccaaaaactaatgatcttaatgtttgctttactttagttttatgtataataacatacattgtgcagatttatccatgatattgtttccttcagagtggcccaatatattgtagaaaccattgtttacataagaaatttcattataatttcactaacttagtgagccaggaaagcaccaagaaggtttctttactggatacacctgatagggccacatggtacacaccatgtgcaaggtgatgcaaggatagttccatgaaagtagaaatgagatcagtttaccccatttcttcaccaagtcctgtatttcactctatgactcaatcatacgtttatacctcctatagtaaaaagttttgtcttctttcagatataagtgtctctgtgatgcaggctgggttggcatcaactgtgaagtggacaaaaatgaatgcctttcgaatccatgccagaatggaggaacttgtgacaatctggtgaatggatacaggtgtacttgcaagaagggctttaaaggtgaaaacaaaagtacatctttctgcgtctgctctttgtcttcttgttgttgcatactgcttgactcacttcttagtttccttttctctttttcattcattcgtgtaacaaacatattgagcaattagacttgtaaggcacttggggaataaaaacatgaatagatacaatttctaccttcagcctagcagagaggtgacctattgaaatagtaattttttttttttttgacacagagttttgctcttgttgcccaggctggagtgcaatggtgcgtgatcttggctcactgcaagctctacctcccgggttcaagccattctcctgcctcagcctccctagtagttgggattacaggcatatgccaccacacccggctaattttgtatttttagtagagacggggtttctccatgttggttaggctggtcatgaactcctgacctcaggtgatctgcccacctcggcctctcaaagtgctgggattacaggcgtgagccaccgcacccagcctgaaatggtaatatttaagatgagcagttaagactccagttttacagcattggccaagtgtctaattataagcttcctggtccaggtttgagtctatgatagttcaaatagatatatggaagtagaatgaaaatattatgcttactataattaagatagtagtaatatcaaggaagaatccacatgttcagaactctttcaacaaactttttaacacattgagatattcttagttatttagtcatctttggtctacaccggaggtcctcaaccctcaggctacagaccagtacctgtgtgtggcctgttaggaaccaggccacacagcaggaggtgagcagccagtgagggagcaaagcttcatctgtatttatagccactccccgtcactcacattaccgcctgagctctgtctctgtcagatcagtggtggccttagattctcataggactgcgaaccctattgtgaactccacatgtgaaggatgtagattgtgcgctccttataagaatctagtgcctgatgatctgtcactgtctcccatcacctccagatgggactgtctagtggcaggaaaacaagctcagggctcccaccaattctacattatagtaagttgtaaaactacttcattgtatattacagtgtaatattataataataaaagtaaagtgcacaataaatgggatgtgcttgaatcatcatcctaaaatcatccccccaaccccggatcatggaaaaattgtcttccacgaaaccaatccctggtgccaaaaatgctgagggactgctggcctacccaacaaatggatagtcatgggaattgtgtaaaatctgcttctgagttatcactgttatatttctaccatcagttttctcttggaaactcacaaaagagagccgtgtgggtaaatcattatatttgcactcatctgtctatttattcattgatttcctcactcaaatattgtgctatgctattgtgatacatcagcatgttttagagccactttatttgattacttgaaacatttctgagactgtatttcagccattaattttctgatatattgtattacattggcaaagaaacttgtagatttcaaaacacttttatttctttatcttctgagacttgcttatcagtgaacaaaataaaattcaaaaggtaaaatcccaaattatatgcccagtgggcagcagaatactccttgaacccatacctctgcattcctagaccatgttttcttttccacagtgccatagtttctctactttaaggctctgtgccaggccctattggagatgcaaaggtgtgcagtatttgggtactgtgctatctccactaattttttattccttttatccttttcttagtgggagaaggtttcatgccttgaatcaggagaaaacagctttgtaacttcaggaagtaccacatgggtggtagacatggtgcctatgaaaaaatgggcataaaccagaggctttgattaatgtattcaaaaacatcatcccttttcctgaccagaaatgttatatacaaagagcttatgtttatcatgcaacaagctattggctgggtgcgatggctcacacctgtaatcccagcattttgggagggtaaggtgggaggatcacttggccacagaaattggagaccagcctaggcaacataacgagacctcatctctacaagaaatttaaaaaatcaagtgggcatgatggcatgcacctgtggttctagctactcaggaggctgaggtgggaggattgctgagcccgagaggtcgaggctgcagtgagccatgattacacaactgcactccagcctgaatgacaagagtgagaccccctgtctcaaaaataaataaataataaatagatcctgcaacaagcttttgaaccaagaacttcattattgagaagttatttgtagttggaggggcattaggctttcagatcattagaatagactgtttttccattcatcttttcaactaattgctgtcatttactgactgtatttcagggacatggggctgaaatgaatgaacaggtatttcagtggcctgaagaaatgaatgcaatttctgatgtgttcagtttttacccctaaagagaattggttagaaattgatgaggctgtcagaaagttttactgtttttggttttttccttttgtctacaggctataactgccaggtgaatattgatgaatgtgcctcaaatccatgcctgaaccaaggaacctgctttgatgacataagtggctacacttgccactgtgtgctgccatacacaggtgggtcctggaggtaccagcagggaccagaggggatacttgaccttgctttgtcagtgcctgagtctcagtgcccaggtctgtggggctgtaatgctcctccgagggctcactcctcagttgtccttcctgcctttactgactggatcttgagctttgaggaaacattgtggcctcctaagatgcaagtggtggacagtcatttgcctacattgtactttagtatttgaaagaaatttttttttaattgtatgtggctggaaccaggcacatagatgatggttgtctatcatttgaatgtttccaggacattagctatttgtcttagtttcaataatacagctaccacttattggtaatttactatgtgccagacactttttgtactttggattatttaatgtattcctcaataattctacaatgtagaagttcctattgccattttacacatgaggaggctgaggcaaagggagcttgcttgctcaaggtcatataggtaagtagtacatctaggatttacctgtaggtctctttgaatctgaagcttttcctcttaatggcctttttacttcccacattcagtaccgctacatctcactcagaggtgtcaccccttcgatggctgttacaactgagaagacgtgagtgtgactgcatgtcacatagctgttctttgtttcagttgttatgtttggagtgtgcttgggacatttattctttgttttctactggcttattatcgccttcttgtgattggttatatttctatggcttgtttatctcctcttcatctatttttctcattcagagggaacaaaacacaaacatagacaataactttgcctgtttcatcaggttgcggcatgcagtcaggagcatggctgagttattacttccctggagtcttgagctgttaatagcagctgttaatagtgactctaagttgtgtagagtagcagaatagccatagcatgactgtgttacctgaaagacttgatagcacattgttactttttcccctctagaagaaatagtaggccaggcacggtggctcaccctgtaatcccagcactttgggaggccgaggcaggcggatcacgaggtcaggagatcacagccatcctggctaacatggtgaaaccccgtctctactaaaaatataaaaaattagccgggcgtcgtggtgggtgcctgtagtcccagctactcgggaggcggaggcaggagaatggcatgaacctgggaggtggaggttgcagtgagccgagatcgcatcactgcactccagcctgagagtcagagtgagactccgtctcaaaaaaaaaaaaaaaaaaaaagaaatagtagtgtagggaaactacatttaacaggcctagttcataaaatcacagttgtaggaggtccctaactatcttgcccaaggttacacagttaacaatatcagagccaatgctggaaagatcatgggcttctccattttcaaagcctcttaatcaggacttttgacttgaattcagagaacatccttgggataaggaaaattttcgttttcttacctgtttatctgtcataaactctgtcatttactttctaggcaagaattgtcagacagtattggctccctgttccccaaacccttgtgagaatgctgctgtttgcaaagagtcaccaaattttgagagttatacttgcttgtgtgctcctggctggcaaggtaagaacatgggtgtggagaagccaagaacatgcattctgactttaaacaaagtggtcaggttatcagatcatatggaaggccctgctggtcttatgaggcctgtccatcttgtcaagagcacacaggttttgcaaaggagctgctacttgaaatggcttagaaagcctttccattgtccttgtcttcggggccccctagcggctggaaggctgcaacctaagcctcacaagccatgatgttcattcttcagggagtttaagcaccttggcagcaacttcctaggccacagaagtcttcctggaacttcctaaagcagggggccaaccagtttgtctgtggaatagctccatgcaccccaactaagctcaggtcctgcgtagatttttgtgggaatcagcttccaaggactaggtcatttattggccctgtgttcctaggtcagcggtgtaccattgacattgacgagtgtatctccaagccctgcatgaaccatggtctctgccataacacccagggcagctacatgtgtgaatgtccaccaggcttcagtggtatggactgtgaggaggacattgatgactgccttgccagtgagtatgccagtcagctcttaagcccccagaggagaggaaaacacacagggagcagaggagagcccagtggaggctgccgcctttcacgcctgacattgggcataccggtcatttatccagcatatttaacagtagtgttttaactctttcttttgaagctagtgtccttgggaattgaggcagtggaatatattttaagcattccctttaatttgtgaacattgaaaatgtgaggacaatgctatgatagtgttttttaaaaaacagatttattgaggtataattaaggtacattaaactgcaaatattttcagtgtacaatttggcacattttgacatatagtaagtgaaactatcacccaaaataataaacatatttgtcaccctaaaactatcttcatcccattgcaatttaaccttctctctttcttgcctgtggagtcacagttttaccttctgtcactatagattattagttggcagattttatcattttatataaatgcagttagataagcataagtcaggagaggttctgacttgttttaatgaacatagtatttgagatccgtccatgttgtttatatcaatagtacattctagtttattgttctgcagtattccattgtatggacatattacagttcattggttgatggccatttgggtgttttccaatttggggatattacaaatgaagttgctatgaatgagtctttgtgtggacatatggttttagttctcttgagtaaatacctaggagtagaatcggtgaatcatgtcgtaagtgtatgtttcactttttaagaaattgccagaatgttttccaaggtggttgtactattttcattctcaccagaattgtatgaaagttctgtttgaaccatatgctcacaaactcttggtgatatcatttaaatttagctcttctagtgggtgtagagtggtatttcattgtgattttaatttgtattattctctctgccaatgatgttaagcatcatttcgtgtgctttgcccatctgcctatcttcgttggtgaaatgtctatttaaattttttgcccatttgaaataattaggttgtcttcttgagttgaaagagttctttgtatttttaaataagaattctttgacaggtatttgcttcccaatgatttccctccaatttatagcttctcttttgattttcttttgaagaggaaaatgttaacattgatgaaattcagtgtatgcatgtttttcctttatagttcatgcttcatgtatcttgtttaacaaatcttcacctaatccaaatttgaggtttatctactgtggtttcttctaaaagttgtgtaattttagctcttacattttggcctatgatttgttttgagttaatttttacatattgtgtgacttaaaagtcaagtttaattttgttttcttactgtactaaactaacttcttattagttgtaggttcgtaggttagcctctagatagtttagattcttaggattttctacagatacaatcatcctgtctataaataacccttatgccttttaatttcttttcaaccctgtatgccttttatttattttagtattattgtactaagatcttcaataaatacagaatagaagtggtgagagaagccttaccttgtttttgatcctaggggaaaagtatgtagtcttttaccattaagtgagatgttacctataggttttcataaaggccctttatcaaattgagagaccttgtacttctggtttttaagaggtctttttgtatttttataatgaatgaatgttgattttttggtgtgcaattgatttctctacatctgttgacatggtgatattattttttggtcttttaatgtaagtaaattgtcatcaactttatttaacattttgcaaatgttaaaagctaatcttaaatttatgggctatattccacttggtcattatgtgttattccttttatgtattattggatttgatttgccaaaatgttgttaaggatttctatatctgtgttcatgaaggatattgttctccaggtttcttggactaccattgtctggttgtgataagagggcaatgctgtcctcatagaacatatcaggaagtgtttttctttctactttctgggagagtttgtgtagaactggtgtgttttcttccaaatatatagacatggaaccttctttctgggaaagtttttaactacaagtttggttttcctaatacatataagtgccatatgggctatctgtttttaattgagctttggtaatatctgtctttcaaagaattagtccaattcacctgttttgtcaaatttgttgacataacatcaatttgttttataacatttccttactgtgctttaatagtctattagatctgtgatggtttccttctcttgtttctactattggtaatttgtctcttctttctttgaaagggaagaatgtctgttttgcagatttttttcatacagtgttctataaatgttattaattcaaattggatagggtagtgttattcaggtcttttatgtcctctatgactttctgtctacttattattcatagaatataataaggaggctttctgtttacttcttattcaagagtattgaaatcttttactatcattgtatattcatctgtttctctagtaattctatttgttttggcttaatgaattttgaaactctaatcttaagtgcataaacatttagggttcttatgtccttttgaggaattgacccatttatcattttgaaatggcctttttaaactcttgtcatatttctctctctgaagtctactttgcctgatactgatatagctactctagctttattttattattagagtgtgtttttaaaaatccttttacttctggcctgtttctctaaaatgggtttcttgtagagagcgtatattgggtcttgtctttttttctccagtatgatggtgtctatcttttaattcaggtatttagactgtttaaatttaatgtagtttttatatggctggcttcaaaatatgccatcttgctgtttgctttatctttgttcttctgtgtattgtttccattttcctttttctgacatcttttgaaataattgagtatttttatgattacattttatctacatacataaatttcaaaactttatctatattcactaccatattggttacatattttttagtagttattgtagggtttactggtgtgcagctttaacttattataatgtaccttcaatcgtaccacttcatatagaggagaagagctgtacactcacatttacattcctcctggcctctcttctattgttgttataaaatgtatatagcattaaacccatcaaatatgtaattaaaaggtcaatttttttcaagatatttgaaaaataatttaaaagtctttaagttacctacgtattttcaagtcttattggtctttattcttttatgtagatttgtgtttccatcaggtatcattttccttctgtctgaaaaaatcccttgaatattttgtgtagtctttgtctcctggtgatgaagtctttctgtttttgtgtgtcagaaaggtttttattttgctttagttttcaaagatattttcacagggaggagaattctaaattgactttctctttcagcactttaaagctatcctattatcttcttccttgcattatttctgaggagaaatctgctgttattccacaattcttttatctgttccttcatatataattctctctcctgtggctgcttttaagatatcctctttccactgatttttaccaacttgattataatgcctgttggtgtggtggtcttttttttttttttttttttttagactgagtctcgctctgtcgcccaggctggagtgcagtggcgtgaacttggctcaatgcaagctccgcctcctgggtttgcgccattcttctgcctcagcctgccaagtagctgggactacaggtgcccgccaccacgcccggctgattttttgtatttttagtagagatggggtttcaccgtgttagccagggtggtcttgatctcctgatcttgttatccgtccacctggacctcccaaagtgctgggattacagcgtgagccaccatgcctagcctggtgtagtgttctttatgtttcttctgtttggagtttactgatatttttggttatgggtccaagtctggaaaatattttaaccattatttggtaaatatttagccattatttttttcaaaagtttttgcgtctcccttttataatgttcattatgcatttattaggctgcaaggttgatttatttatttttcagtgttttttccacttagtgttttattttggattattttactatttgaagttattttgttatactttcaagtttactaattgtttcctctatagtttctcgtttactgttcatctcatttagtatatttttccctcagatattatgtttttatatgtggaagtttaattcaagtctttcttttaacgttacctccctctttgtcatgttcatgcttttatttccttcttgaatatattgagtatcgttgttttctagttgataataattgaccatattttattgtccttacctacttttctaccatatgagaaattcctgagtatgtttctgttcatattttttctactcattttgaatgtatttcctgcttctttgcctgcctggtaactttttactggatgctagacatccatcttacattgttccatgctgaatttttttaaaaatcttttttaaaaaaacatttttgagctttgttcaaatattcaattatttggacatagttcaatccttcagagtcttacttcaaggtttgttaattggttccaaaatagtctttagttgagggctaatatggctcactactacaacaggggtccctcaggactctacttactgccacgtggtttttttcattcttattgaataaacatgagctgttctcagcccagtgaaacctctagggattattctgcctacttctttctggtggttcttcccccagccttaatagttttattacatgtatgtactgaccgatccttagttacttgtatagtgatttaacttcaaatgagattatcacaatgcattaataatggcaccttaatttacaggatatataacttcagattatcatatagaggccaccatgctaggtgccggcagtgataagataaataagttttagtttctattttcatgaagctcatagtctgttagggaagaaagacatatagacacagttcaagaccagcctggccacatggtgaaacctggtctgtactaaaaatacaaaaattagccaggcgtggtggcaggcacctgtaattccagctactcgggaggctgatgcacgagaatctcttgaacccgggaggcggaggttgcagtgagccaagattgtgccactgcactccagccggggcaacagagtgagacttcaccaaaaaaaaaaaaaaaaaaagacatatggacaaataattttaatgatgtattacaaatagtgaaaaagtatccaaggcacaattgatggagaactttagggagtgagatcaagctgtttgtattcctttctcacattaagtaacatgtcattcaaaatattgagtatttttaaatttttctgtatgaagtgggaccaacaatatttacaatgagtttaaaataattcagtaaattatggatggtgagtttcctgaaagatgctatggaaattatagtagctgtgtactgtggttaagaaaaactgaaacaatttttacaattgctttaatagagattgcagatgagtcttataagggaattagttcaagagatgaataaagtatattaaatgtttcgctaataaaataaaggtcacattaccctttagtttagtatttagttttcattttacatgtatgacctgtctttgcaattatatttttaagttccttaagagccatagctacagcttatttttcttgttctgatttgtatggcatataattgtagagtgccgtggcatgactgtagcttaaaatttgttggttccttactatgagtataaagtgttccaagatcaagctatgtgatatttcaatttttatttaaactgtgtttcataaggctactgaaatctaaaagagagagaaaaagagagagagaggagatggaaatgaaagggagagagaagattatataattaatatgcctggaaaaacatgaatatgtgtattttgtcctcccccacacactccacaatcacatataccttttgaaaatattgattgatattctgtgtattggggcacatatttgatttccaaatgtgtgagggaccaatgcaagttttatgactattaattttacaaaactgttggtggtgacatagatgaagtttattccaattaataaacaggttaaaaacttcaagcaagtattattgaattcattttcataaatgagggagttggcaaaattgaatgaaaaagtcagaattatgctgcccccagcatgacttagttcaggtcattcacttttatgaatctaagattaaactgatgctactcttcagaggtctaattcttttgtaatggcttagatccttgccagaatggaggttcctgtatggatggagtgaatactttctcctgcctctgccttccgggtttcactggggataagtgccagacagacatgaatgagtgtctgagtgaaccctgtaagaatggagggacctgctctgactacgtcaacagttacacttgcaagtgccaggcaggatttgatggagtccattgtgagaacaacatcaatgagtgcactgagaggtgagcaaccagtccctcgggcatcagcatcttacgagagaaagggagaaagggaaggaaatttcagagcacaatgctagaattgtggagcagggatgaggtgtccacatggatcccagtccacagtcatctcctattgcccggttactggttcctgataaacatatataatagaaagttaaaggtcagaggttgcaaagtttatagggatggtttattatttcttgcttagggaacagaaagagctataattttgttctgttcttcccttggcctctcattcatttcaaaaatccaaaaattccagtttttctgcagagattggaattgttactagtctttaagtaatttctgggagttttgtttcatttctttttataatattatgagcatgtttgttctatttgtcttttataaataatctatagtgaataggacttttcaaataaattaaattgacttagagataaaatgaaatgtgatacatgggaaaactacagaaggactgggtaaaacctagaaaacttcattttctgtaggtatctatagtaagctcagtcttttaaatacttctaagcctttgattatagaaaggaagtgggcacctcagagcttctggcacccaatctagcttgtaagaaagtttaagggatatgggttgctcagaggtatttgcctctgtatgatcttagattccagaaatcttactttgtagtagtaagtcacaggcaccagatacatagctgatgttgctctgtttgcttcttagctcctgtttcaatggtggcacatgtgttgatgggattaactccttctcttgcttgtgccctgtgggtttcactggatccttctgcctccatgagatcaatgaatgcagctctcatccatgcctgaatgagggaacgtgtgttgatggcctgggtacctaccgctgcagctgccccctgggctacactgggaaaaactgtcaggtaattgacttccttcccattcactcagctcccctagagcagctgaatattatacctgttcactttctagtctgaataagttccttctaaaagagaaaattgtggatctcagggattccctgagataatctaggtaacttcttaataacttgcagattccaaaatggtgctggcaatatgatatagattcacaaacataagatcttgaaaagaggctaaccaagaactgcagaaaaatacatgtgggaaataaacacagatttttgttttttgttttttgtttttttgttttttacattggaagcacaaaaagaactgaagaaaatagagaataatcaaaataaccttttaaaggtcagatgcaacatctaagtgtttaataatgataattgttgtatcttgcaatgtggtaacattctcaaaaccaaacaatttacatatcttttaagttcaaatatgtaaatacacacttccattaaattttagaatggaaagagcccttataggcaactaatctaaccttcgatttcatggaaggcgaaacagccccagaggggcaaagtaacttttccaaagttgcataccaaacagccctgtgtttaatttaatgttattctacctctttaatagtgatagaataataactccaaagaacataggaataaatggccaaacttaacttgacttacagggcgcacttaagtaaggcttaggctatattagacatgtgagcacccacctccacaaaattaagcagcttgttgctgattccatggatcacgagagcatttttggttgggctcctatttgttctcacagtgtagattggcagtgctggtgaagcactcctcccttcctccagcaaactgtctatattgtgaatttggccttcctctcctcaaggggccaagccactccgtgtgtgaattaagatgaaaggtgccagtccttgtgcactctttgcttcagatttttcataagtctgattgccttccttagaaataagctcttaaacggttttaggcttattaacaggcattaagtccttttacccatattcaccaaagatagatttggtcaagacccatgtggatttctcacacaggattagcacagaaagtatgaacctgtctgacagctttaactctttctttctagcattacagggtggctatacatgtaggcaaatcatgtctagagcattgggaatagcttaacctgttgggtttccctgaatttttaaacttttttggtaagaactttttaaatagaagacctaagaggaattagactacagcaggccctcaagtaactttgtttccttcggtgtcattttgttacaacattgagtgggggaaaaatctgtttttggccagagctgctatctgtgtggggtttgcatgttctccccatgtctgtgtgggttttctccagggactccagtttctttccacaactcaaagtcatgtatgttgggtgaagtggacatgtctacattgtcccattgtgccagaataggctctggccactcatgaacctgaactggagtaagtgagttagaaaataaatgaatggggccgggcacggtggctcacacctgtaatcccagcactttgggaggccgaggcaggtggatcacgaggtcaggagatcgagaccgtcctggctaacacggtgaaaccccgcctctactaaaaatacaaaaaattagccgggtgtggtagcgggtgcctgtagtcccagctactcgggaggctgaggcaggagaatggcgtgaacctgggaagcagagcttgcagttagcggagatagcgccactgcactccagcctgggcaacagagtgagactccgtctcaaaaaaaaaaaagaatgaatataccaattattataaaatgaaaacccataaagcctatgataatcatatgagtgcacaacaataaacaatgtggtacaaaaccacccagcaagcctgccatattggttagtgttgctttctgagctgtgtggtggtaagaggtgctgacggttttgctttgcaaacatttattccttgacttgacctgccaccactaggactgctattactcatggattcaccaaaaattggataaataattatcttgtttttattaatatttcttaaatgaatgtatagcttgtttattttaatgtttaatatcagaagtgggtgttaatttgaagtttagtgattttttttttaaccagaaataagtagaggaacttaactcttttttatatcaattagactgtggtaaaattggtttcgttatatatcgttgtccttaaagtcacagtttccaagaacctaatgatgacattaagtgaagacttaacggtacgtaaaaatggttaggtgtacctcggaacactgaatctagtttaagggctcttttactagatgaaggctctttttctttttaatcagtttgcttttctttgatttcttgtaacacaatataacttcttttcttcatttctagtatttgaattttgatgtatgtacacccctgcctctgtttcagaccctggtgaatctctgcagtcggtctccatgtaaaaacaaaggtacttgcgttcagaaaaaagcagagtcccagtgcctatgtccatctggatgggctggtgcctattgtgacgtgcccaatgtctcttgtgacatagcagcctccaggagaggtaagctttgctcccttgggctcaggtcattcactgcagtattgactgtccagtggcatttagagaaggtatcatttttttgtggaataagagggaagggcagatagtagtgggtgggcagggctctggggaaagggctcaagacagaaggtgtaagggtagaggaataggttcagagattcggagaagaatgtatttgaaatgaaactaaggtatattccactttcagggtttatttttaatatgcatctggtactgagggttgtgaagaactggctaagaataagattggatgtgtcagccagtttagatttacttgctcattggttgatttgaaccccatgtgtcacatgttcttctatgacatttctccctcactgggtttcccaggtgtgcttgttgaacacttgtgccagcactcaggtgtctgcatcaatgctggcaacacgcattactgtcagtgccccctgggctatactgggagctactgtgaggagcaactcgatgagtgtgcgtccaacccctgccagcacggggcaacatgcagtgacttcattggtggatacagatgcgaggtgaggacactgagcaagcagaggtcatggacctcccaggagattgtacaactgtttgagcactgatatattgaatttagctgcttgtatcttatattgatagtttatagatttttaccaatccccgtcataatgtttaccactgtttctttcagcctctctgtgcaataagttaacaggtccctagtatgatatttttataggcgtctggaaccatcccagctccttaggcttgcttttaggattcagagccaagagtcactaccagagtgcattttacaggcccacccaacatagcagtccacacttccctgaatagcagctgagataggaaaaactgctttgtggagtgtccctttggcccctgtcacctttgtatttagtcattaatcagtcaactagcaattttctctcaaaaaaaaaaaatgttgctcatcctgttccccatagcatcatgctaaacgttacatgtatatatttgaggaagtatgtgtcttcaaggtacatgtcactattttaatgtctgggctgataatggttagagcaagcaagatattagcaaaatgcctgagacattaatttgataccaattcaaaccatcaagcaacactgagaaaagctttgcttctctattgttatataaatgagccaacgatagcttctgtattttggcccctaggttgtttatttcttcacagcaggctggggctgggtctcattagctcaaaagcctaccagtgccaaacccaaattttgacacatctagttgttttaaacatagcccccaaataagcagatttttagctatttagagcttgcctgctttgcatagcctgtaaaactgcagccaaaatctgctagccatagtataagtaggacaagatataccctggggccatacagaccccaggctgatgctggcctttagagctctctgacccagagattcctgccactggctgttgagtgacatcacctagactccttctctgatccttctttcccagagtttacttgctgtcttccccttactcacctacccctctggaaggtctcatgctatttgggacttctcccaggtgcaaacctgtcaaagtgtccaaataaagccacctcacagccatatcttttttcttggtcagccctgaaatccttccaacccctacagccaccacagccagccagccagccccacctccctctacccctaagcctatctcaaccagtttctcacacatagatccaatttcctaaacctggagatcaataattgcatgtctgtactaccatccacatatgccttttgaccgagtcatagggtcctcatcacatacggaggaatgtgtattttaaagatgaggaaacctgtacccaggaggaacaaaaggtttgcacacaagtcaaatctgaaacatccttcattgtattcagtccttgccttccctttaaagtgcctttttcaactgaaagaggagtaggtaaatgccagtaagctgcaggttttctgtccctgcatagaatgattagcagagagtgtgatggttccagagaaaacatacaaaagctaaattaggaggtgggagacagtcacagaaatgttccagatctcactagctctcatggtctgtttccagtaatggtccaatatttcttgtcctttttgtttcctcatggcagtgtgtcccaggctatcagggtgtcaactgtgagtatgaagtggatgagtgccagaatcagccctgccagaatggaggcacctgtattgaccttgtgaaccatttcaagtgctcttgcccaccaggcactcggggtatgaaatcatccttatccattttccatccagggcattgtcttaagttataaatccattcttagtgttcaggggattttataaaattaaagataggaagactagcttcattccaagcatttagttctacatcctagtaattcaagccattttattctcccatctcttgctagctctgatgttgtggtttatgttgtcagttttatctggttgtttggcatcttgatattccatgaaacacagaatatggaagggatacaacattagcataacattaaaaaattagcctggtcagtaagatttcttgttgcttcacagaaaagcaactaatggcctctaaaataaacaatttacatttacctgcttttgtatttttttaattagccaagtcttacctctataaggtgggggaatgaatgaaatgaaaatatctgcctattttcatagcttcaggggaggatactgatggtgtaaggttctaccttaggatgcagtaaggcctgatgagagatgcaaccctggactgttgagtgatggggccatcattcttctgtgggcattgccactgcttttgaactgagtggtatggccatcattctgctgtggacattgacactgcttttgaaccatcccttggaaagagctttgagtattgtttgttagaagggatgtagttatgctggggcctactctgagaaggctgtgaaaaaaatgtaaaaggccatccacactggtgagaaattcatccttgttagtgtcaaagagaatagaatgccagagaagtatttgtattgccttagagctttgtgtcagtaaagtttgataatttgccaccccaggtatcagagtttgactaaattaaaataggagagtaccctagtagtaggctgattattaaggaatgaggttaatgggaagaagaaaactaaggagaaacagtctttaagtatttgaagaattgtcctgtaaaaaggagaattgttctttattctagaaatcagtggttgagtagaaattaattccagttcattgttagtttgttcctttgagaaactgtactggttaggacaagctacgattctggtgatagctgttatcgtagttcatttatgttgctataaaagaatacctgagactaagtaatttatttttcgaaagaggtatatttggctcgcagttctataggctgtacaggaagcacggtgccagcatctgcctctggtgtgagcgtcaggctgtttccactcatggtgaaaagtgaagaagatccagggacccaaacacctcccattaggccccacctccaacattggagatcacattttaacatgtggtttggtgcagtcaaacttcaagctatagcagctaattaaacctcaaatctcagagcttaatataacactgattttgtcactcaaataaagtcgaatatgtgttgggctacctttctctgtgttttagatatgtggtttgaaacacctggcctccaaggcctccacagtacagggaagagggacagacttgaagggtcatacagcagcttccactagctcagtctggaagcaacacatatcactatccctcgcagtatattgaccggaattattaaatggtctctgtgacttcaagggaggctgggaaatataggagagtacatgagtattcatcaaactctaaaatcactactataccatgaacttttaattaataagacatgtccagtcctagaatggatcatttcagaaggaaacaaaatttttgtctcttctaaccatatggtaaagatggcttagaatactagttttgatattatcattgacagtctttttctttcagcactttgaatatatcatcccactgctttctgatatccatggtttttaatgagaaatatgctgttaatcttattgaggttcccttatatgtgatacattgcttctttcttgatgccttcaagattctttatcttttgatagtttgattatgatgtatgtaggtatgaatttctttgagtttatcctacttacagttccttggattattttactgtgtgtgcttgtttaggtatgtggaacagtatttttttatcctgacttaacttctctggccattggtaaacattccaggaaactctcaagtcccataaccccattgttagagtcatcacaatgtgtgttttggtcaccatatttctaagccttagatctttgcctgcatgtcccaccagtttcccaggtcaagggctaaatgtaacagttctgcctcttcctactactttgcttcaggctgaggttgagttctctctcagttgatagatctgtttatttctggtggttccattctgatggggaaatatgcatttatgctcattttactagcaatccctaaatatcaaatattctttgagacagggagcatatactagattttgtttgtttttacttttttgttttcaatttactctatgtataaggtgatatatgcatatatgcatatagaccaaaagtgtattcacacatagaaaagtatacagtgaaaatacttctcattcccatctctcttctggtgggcaaattttccctctcctgcaaacatgtaatcgccacttttggttgtttgtgtttctttctagaatttttcaaaaactgtatccttcagaatttctttatgtagagagaagccaaatgcaaagatattttatttcctttactttttactctgaagatagaatattagacacattttttgcacttgatttttttttacttaattggagatattttcatatcaaaatatagaacttcctctctctctctctgagatagatagatagatagatagatagatagatagatagatagatatttgtttgtttgtttgttttgagatggagttttgctcttgttgcccaggctggagtgcaatggtatgatctcagctcaccgcaacctccgcctcctgggttcgagtgattttcctgcctcagcgccctgagtagctgggattacaggcatgtgccaccatgcctggctgattttgtatttttaatagagacagggtttctccatgttggtcaggctggtcttgaactcctggcctcaagcaatccacccgcctcagcctcccaaagtgctgggatgacaggcgtgagccaccacacccagcctgaacttcctcaatattttttatagctacagaattcccttttacaggcataccatattttaaccagtgccatcatgatagatatttcagttatcttgcaggcatataagtatattggtgaaataaattttcagaaatagaatcgctggattggataatatgtgcatttatcattttaatcagtgattgcagtatatcagcatattggctttttcttaaggtggagaatatattttcatttaagaatcattttcttttgattttttttgcagtttctttgtttatatatatatatatgtatatatacatatatatatatatacacacatatatcttttttcccacattaagttgttgatgtaatgttttgtggaaattggctatgatataaaaaaacaaatatattcccagtatttttttatcttttttctttatagtgatttttagtgcacacttttactttttaatcaagttgaatttatcacttttaaaatggcttctggattttgagttgtagttagcaacatcatatacacttgaagatcgtaaagaaattctcccatattttcttcaagtacttttgccatatgactactcatttgttaatacacaatttattgaatattttgttttttatatatataatgatttgagatggcacctttgccagattctaaattcccatgtgtatttttggtgttcttctggattttctttattttctgtgttattctattaattcaccaataacgttctatttcaattattaaggatcttcttcttcatagttttcctggttattttttttcacataattttataatcagcttgtctgttaataaattcctgttgataatttttagtggggtctcattaaatttatgaattatagtatagagaaaactgataactttatgatgaggagtcttgctaaccaaatcctggtatgtctttccatttattcaagtctcttttgtgtctgttaggacagtattaaagttgtcttcatttaggtgtaacacatttcttgtgaagattgttcctaggtattttatctttggtaatttggtaattgcttttgaaaattgggccttactttacatttaaaaaaaaaaatcttgcttttgttagtgtatgctacaatgcaagtggcaggaatacatacagaactgttttcttttgtaccttttttttttttttttttaagacagagtcttgctctgttgcccaggctggagtgcagtagcgcaatctcggcttactgcaagctccacctcccaggttcatgccattctcctgcctcagcctcccgagtagctgggactacaagcgcccgccaccatgcctggctaattttttttttgtattttttagtggagacggggtttcaccatgttagccaggatggtctcgatctcctgacctcgtgatccacctgccttggcctcccagagtgctgggattacaggcttgagccactgcacccagcctgtacctttttttttaattatgattattattattttttgagacagagtcttgctctgttgcccaggctggagtgcagtggcataacctcggctcactgcaagcttcatctcccggtttcaagtgattctcctgcctcagcctcccaagtagctgagattacagacatgtaccaccacacgcagctaatttttgtatatttagtagagatggggtttcactgtgttgggcagattggtcttgaactcctgacctcaagtgatccgcctgccttagcctcccaaagtgctgggattacaggtgtgagccactgtgcccagcctcttttgtgcctttttgaattaatcatagaataatttctagaatagtcattgatttcttttgtttctttgtaagacactatatgcagatattcatactagatggctcatttacatctatagtacaataaattagtcctgttttaaatggaataacttttgaactctcagcaggaaatttatcctctatttttgttaaataaaaagcattggtgcacttatacactattacagaaaaaagccagtgattataaaacttaaaaatgtatttcattcaaaattcagttccagttgttaccaatatttttacataacctatgtatagtcatgggtcacttaacagtggggatatgttctgagaaatatgcccttaggcaatttcattgttgtacaatcatcatggagtgtaattacacaaacagagagagtatggcttactacacacctaggctccaaacctgcaccttgttttactgaactgaatattgtaggcaattataacacaatggtaagtatttatgtgtctgaacatatttaagaagaggtacagtagaagatttaaaaggtacagtaaaaatacaatataaaagataaaaaatagtacacctgtatagggcatttactatgaaaggagcttgcaagactggaacttgctgggtgagtcagtgaatggtaagtgaatgtgaaggcctaggacattactgtacactactgcagactttgtaaatactgtacacctaagctacactgaatttatttaaaaagtaattgtgctatgacattacaaggctatgatgttactaggcaacaggaatttgtcagcttcagcttcattatgggaccactgtcgtatgtgctgcctgcattgactaaaatgtcattatgcggttgcataactgtatttattgttatgttcttttttggactgtttttatattttggattatactttggaaaaattactgagcctctcttgagctccagtttccttctctttgagatgggacaaataataggacctacaccatagggtgctacttcactggattgtgtgggagagtacatgcggagccctagtatgttctttcctttacttgtacaactcaccaggatgacagctgtcatgaataaagagtgtgctttgccctgcccaactacaaggtcccactaccagttgaggagtatactctgattcattgtgaaaatgccaacaagggtggttatcccttgctggaaagcaggttaaaaggattttcataattctgtacctcttctctttcctccaggcctactctgtgaagagaacattgatgactgtgcccggggtccccattgccttaatggtggtcagtgcatggataggattggaggctacagttgtcgctgcttgcctggctttgctggggagcgttgtgagggagacatcaacgagtgcctctccaacccctgcagctctgagggcagcctggactgtatacagctcaccaatgactacctgtgtgtttgccgtagtgcctttactggtgagaagctctctagcctcctggccactctgccttggaggatggttttagtgaacaaattgggccctgtgagttgtcccagacccaagtgaagcttttcttatataagaaaaacaacagcagcttaattttttaaagccagttttttcttagtctgtactttatggatgttatgatcagtgtctacctttaatttttcctaagagattcttttgttgtgcattgattatatcatgctatggcaggaatattttttacaatgtatattgaaagtagttgaacaaaataacattttttaatagtggcaaaatatccaaaacctaaaatttactatctgaatcattttaaagtgtacagtgtacagttcagtggcattgtttagtacattgacattgttgttctactatcacccccattcattcacagaactcttttcatctgaacaaaataacattttgttttaaggaaccttacgtctaactccggtttcttcaccctgcctcctttgacatgtgatggcttgaattactgggtagttcctgccaccatgatctttccacccctaggactcagagaagcttaggaccctgcttagatacttaaagggggcaggtccaaattcaagtgtgtttaaccaaagatcagttgatgtgggtatgaaatgaaaagttgcagtggtcacaagtaatgccttgcccagtaaaggcttggccatgttcctactctgttcccaagcttctttctttcatcacagggcctgaagatgaccaagctctgcctcagaataggggtcttatcacaagaacttactagttacttctggagagggcagcatggtgacttttgggaactaaaatagttgtttgtatccagatgtggcaggatactcagatttgaaatttatcatgcatttcctggggtctgtagttgtatttcttatatggagggtgtgatcagattccttaggagtcagaaaataggctttaatagtctgtttacaaacaattcatcaagctgaactctgctacatcctgagcccatctccagccatctttccttccaactttaaagatatgctaccttacaatcttggaattttgtaaagaatgggagggattctgcaatatggaagctccctggatacactaacatcaaaaaagaaatagtccattgtgaacataatagctattgaggcaatgtggaacagaataagtatgaataatctgtctacagcctcgtattggccaaactgcactttgaaagccaaagcatcaaaactggctcctgtttctttcattgcccctgaggcttttttctctggaaacacaagcatttgcaaagtaagggggaagcaggagaaggaaggaatggagaccactttgaagtagtatcccacagccaggaagtagtgtttgtgcattttccacatttgtgaatgaaaaaaaaaaaatcccttgaatacattgagcacagttattgtgggatgctgttgcagagataaacagcaagggactggtggtccaccaagctgtgtccatgtggtggctgctcttggttagcggctgctgctgtgatttgaagagacaaacatttatacctcttgctgcttgatctcgttggccaaaaacattactatttttatttcatttttaaagctacctcttctttcccaagtgaccaccggccaaatggggcctatctcctgctgttggccaggagtcccagctgtgccctgcgtctcctctgtggttccagttgcctcgttctttatcttggagcagtggcccccaggggccttccgttttagaactattcctagaggaaactaactctaggaaaattaagctgtgttttaaggaatacgagttaggttacagaaaggccaaaaagtgattgaaatgaggtatcacagatgaaaattctctataccgcaaatcaccatttaaatgtattggcctggtgtagcctctcctatgaagtagataacattaacaaaatgcagtgaatagtttttcaactgtttttttgcaacttatgaaagctaaaatgacttcaaaaagctgaagtgtgatttctctttttttgatgggatttaagtcacttttctcacccaccctgttgtgtgagttggtacttactgtgtaggcaagacagagtaagggactggcctgagctggtgacaggccaatcatgttgagatgcagtgagtgttttctttctatgctcagattaccacaggcctagaactgaactctctcacacttgcttcacctatggctagttcccatcccagcaaagtttgttgagtaacttgcagtgactacttctgccttttaaaaccttttttattttttattttctgaggccggcactgtgaaaccttcgtcgatgtgtgtccccagatgccctgcctgaatggagggacttgtgctgtggccagtaacatgcctgatggtttcatttgccgttgtcccccggtaagtgccctgttgctcatctaagaaggggcattgtctcttccatacaatctgtgaacagaactgagattaaacctggttttaccaatcttcgaaatgggaagatttctcaattttagctctttcagaggaaagtgcttgggtttttccatttaaagctgtttacaagtgacaaaacaaaacaaaaacaaataaaagctgtttagacactcccagaaacagtgagcttcccaatccatgactgtcagtcttaagaaaaactaagggaaaaccacaaaaagtggtggagtgcccccttgaaaatagggctgatgtgtggggcttcttggccccaggctggagggtaatctcactgcccagattgggccagagttggtggaaatgctgctcttacattctttagcaggaaccatttggaagcaagttgtctcttaaagtagagggaagctcaattttagctatttgctatacccattcttttatcactgccagaggttgaaaccttcccaaaacaagagatccctatgcctcgggagataccaaaaggaaacctgtctagtaaccttggcttgggctgaacgggaagtacagaagggagtgagatgtggaggttttctagaaacctcaaacttccaatatgactgttttcctaccaatgccatttttatttcctcactgatttccacagggattttccggggcaaggtgccagagcagctgtggacaagtgaaatgtaggaagggggagcagtgtgtgcacaccgcctctggaccccgctgcttctgccccagtccccgggactgcgagtcaggctgtgccagtagcccctgccagcacgggggcagctgccaccctcagcgccagcctccttattactcctgccagtgtgccccaccattctcgggtagccgctgtgaactctacacggcaccccccagcacccctcctgccacctgtctgagccagtattgtgccgacaaagctcgggatggcgtctgtgatgaggcctgcaacagccatgcctgccagtgggatgggggtgactgttctctcaccatggagaacccctgggccaactgctcctccccacttccctgctgggattatatcaacaaccagtgtgatgagctgtgcaacacggtcgagtgcctgtttgacaactttgaatgccaggggaacagcaagacatgcaagtaagggcttcacgttttccagaactgaaggggactgtcactaacacacttcagtttctcgttcttgctcctaaccactccagtgcttcagcctaagctgcctctgcttttcagatggtgccagccttgtcccatcgcacactgccctgtgctctcccttgctgacaatgggccaggaatgctcattgcataatgaccctctctctctgcctatctttgccttctcacctgctgccttcgtgacctcctgggggatataacttttggaagtggtgtttcccacttcaagcagcctctcacataacctgcctgcaggatggatggaaaggtctgtatctctctcttcaccccattcctttccctaagactgtttttccccatctagatttatcaggaagcatgaattagattaagtctgtgaaccctcccggtcttaattgtataggatgctctatggtttacttaggaactttcctattaactagccattccatataatttaatcccaattaattctcagcaactcacgaggcataggtattactaacattctttcataggtgagagaacttaggcccaagggttaaagaacttgccaaagcaagttgtttctttgactcctaatcttctgattgagctagcatgaaaagttgtaccaaatagtataaatatcaaggggtaggggatgaggagaggagagtatagatggaatagtttgtacatcatttaggtttgggggttctaattccttttccaaatattgaaagagcctgtacaagtaatatctggtgtgctataaggacatacccatctgcctttaccttctgtagttgggattcactcttgaaagggaaagaaatgggtcatgttaatattgttctctgtatggcaactctcaatggttcagggccttgtatcaagtttctagaggcatctttcacttcctaaagcccgttgttaccttactgggggcaatggatttctctaaagtagaggaagcatgaaccaggttgacttttgtttcagatatgcagctttgtttgaaaacctgacttaacaggcttgtaaactgcctgggagcccctaagctcctgcagcatagtgagtacaatgttcttcatttaggaagtactcaacaaggatgagtggcataggcatcagggataggagatgcaaagaaggttttgtggggcatttgggtcctgggtgtgggccacagaaaatgggtaggaaaatccacagtagttccaaatgaaaaagcaaatagagctccagtctaatctgagctcttttgcctgttctctgcttccccttacctaggtatgacaaatactgtgcagaccacttcaaagacaaccactgtgaccaggggtgcaacagtgaggagtgtggttgggatgggctggactgtgctgctgaccaacctgagaacctggcagaaggtaccctggttattgtggtattgatgccacctgaacaactgctccaggatgctcgcagcttcttgcgggcactgggtaccctgctccacaccaacctgcgcattaagcgggactcccagggggaactcatggtgtacccctattatggtgagaagtcagctgctatgaagaaacagaggatgacacgcagatcccttcctggtgaacaagaacaggaggtggctgggtaggtgtttggtttctgaacttcaaggctaattttatgaagcctagcactttgacatatagcacaagtcataactcaacctatagaaatgcaaagatcagaaaaatagaatggcccaccacttaagataaacccgttaccccagtacttacgtttaaatgtaaagatatgccttcgtcttggctgaaaagtgggcaggggtacacaggaggcagaatgtctggaaggcctcctcagatgccagaatccataaccttttgccagagttgcctcaaatccctttattagtgacattcctttttacattaatcattgccttattgttaaggcccttctttagaatatatgtctctttgacacaggtaatgatcttcagttgctctgtcattcacacctcactctttgttggtatattgtcaaactttcaaccctccagctagctgagataccaatgcagagacaaaggaaaataaggactaaaaacacacagggatgtatgtttagagtagcaccaagtaccactgagtaggtatgaaagagtggaagaagaccactgaaaccttcgggaggaaagcacagcttctcactttgtcatgcattgcctcagccagaaggctttggtcagccagactaaggaaggtgggacatcctctatgtgggaattagtgtttaagatctcaagggacagtattctaattcctgagatatgtcttaaggcagcatcccagaggtggggacctgatgctgaaggggaggaagggaggctcctgtcaccctttatgacatgttctgcctgacctgcactcttctgttttacccccatctctcctcctccgcttctcccttggcatcccacagctctaaagtctttctggaaattgacaaccgccagtgtgttcaagactcagaccactgcttcaagaacacggatgcagcagcagctctcctggcctctcacgccatacaggggaccctgtcataccctcttgtgtctgtcgtcagtgagtggcactggtgtaaaggggaaaggtggcgggggaagagtgtcaattgggggaacaattttcattatgtagccctctattttttcaggactgttgaggtcaaagttgccctctaaatgaatctaatgctgacattgagaggttaatgttttattcagcactttccctgtctctgtggactttcaggtgaatccctgactccagaacgcactcagctcctctatctccttgctgttgctgttgtcatcattctgtttattattctgctgggggtaatcatggcaaaacgaaagcgtaagcatggctctctctggctgcctgaaggtttcactcttcgccgagatgcaagcaatcacaagcgtcgtgagccagtgggacaggatgctgtggggctgaagtaagaggcattgccaataagccactattcacagtataagtagggatgactagaaaagcatatcttgttgaatcatgattttaaattctaagctctgggcatttactcacattgaccatgattctaaatgccttgtgagtgactgaaaccacagtcagagcgtgggtgcatctattctgtgtatattatcacaatgccgcccagcttctgtgttgaggtgcccttttgttgtaagctcacgatcaatgggaagggaaaggatgaatgccaagggaatgtcaccaaaaatactgcccatcttctctgggccaagaccctgcaaaattgtaatatagccacgggagtgtgtcatggtggaaagtgttgaaaaccactgtattagtttatgactgccattcttattttttctttttataatcatattagaaatctctcagtgcaagtctcagaagctaacctaattggtactggaacaagtgaacactgggtcgatgatgaagggccccagccaaagaaagtaaaggtgaggtggccatggtagaaccaccattgtcagccattatctggttacatttcaaatttctgtcctttagctccagagtgtcctgaatgggagtaaagagtgatagtcttgatgtcttacccagacaataactatcctaggttctcctaaacagcaggaatccttaggacgtaaatgaccttgggttacctatatatgctcttcaagaataactctttaaaaatactaagcacatctgtttcctttagtgttatgctggcagtagtcaagtcaggaatggtgtgtgtagatggcaattccttcatggccacatctcttccttatcctttatgggcacttcttctataagagaagatgaaattaagcagtggaagaaagccagttatcattgacattggcaaaatgaaagccagtgatcatggcaaaacgttgacattggaggctccataccttgagcccaggaaactaaagccatataaaagcaagtggtagattgggctgagactgacatgaaaaagcagaccatccatccacagctgtgcatggctgggagctggtggagcatgatggttaagaagattgctttagttaatatcagaactggattcaaatccaaaactctgccgcttagtagctggcaagttacttaacctctttgtaattatccttccttgtaaaatgcggataataataaccctttcctctgtgagttgttgtgttggcatatgtgccttatctactttcctgtcatgtactaggtattcagtaaagggtagctgcttttaaattatcatgattattattattgaatagtctttcctgagtgcttactacatgttgggtgctatgttgagtacaaggaaacaaccttgaacaaggcttattttcccttcttgagaagcttacagccttgtggtggagatggccatgtagtgctgtgtaagcatttaacacatgatcagttaagcagaggtaagcagagtatgctttttagggccaacaagaagaattaaagtttactttctagtggagggtaggaaaagtgagaattgggtgctctggagatctaaaggctaaagcctagagtttgggattgggggagggagttgtctagatgatgcaggaaaggtaagcaggagccacatcacgagagcagtgggaagccaaggctgaggtaatcctctggaggggtggaggagtaggaagagagaaaacaatgggagataagcagcggtggtggaggctctggacaccttctgattagcagtttctggtggtggccagattgatagggagcattgttttcacctttcaggctgaagatgaggccttactctcagaagaagatgaccccattgatcgacggccatggacacagcagcaccttgaagctgcagacatccgtaggacaccatcgctggctctcacccctcctcaggcagagcaggaggtggatgtgttagatgtgaatgtccgtggcccaggtcagcaccgggcctcttcccctcttcactgggctgtgtctgcccatggttccacattgttgtccctgtgtttgccctgtccagtcataaaccccttcccaatttcacagactctaaatcagctcgaggaaatgaatgcttaaggaatgtagccacaaagaaattatcagctcagaaagggaaggatttcacattgcttcatgtacagtgtgttgagactaaacaggctgataaaatgggttagattgtagtgggatagaaaaataatatcccaaagcagaggatagttagtatcttatgcatgtattaattgttctattaatattagatatttttaaatgtccaattaaaataacagcacttaaacttgaacagaaaaacgtgtttagagaagagcccccagcttaaaaagacttgtactttcccattattctttacagaaatgatactatcagaggaaaaggtggcaaatgtgaaactaataaccagttactacaagaagtacagggaattctttgcccctaagaataactttagtcaaatagagctgtttcaaccatagggttaactaccttctccttcttgagtactttatggaattttccattcctacagatggctgcaccccattgatgttggcttctctccgaggaggcagctcagatttgagtgatgaagatgaagatgcagaggactcttctgctaacatcatcacagacttggtctaccagggtgccagcctccaggcccagacagaccggactggtgagatggccctgcaccttgcagcccgctactcacgggctgatgctgccaagcgtctcctggatgcaggtgcagatgccaatgcccaggacaacatgggccgctgtccactccatgctgcagtggcagctgatgcccaaggtgtcttccaggtaaagaacatgagaagagtcacttgaataataattcctatggctctataatgttttatcgtttttaaagaattaatatctcattgaatttattcaatcatttgagagattagggcaggtattagagtcatgcttggtagatgggaaagtgggaaaagggaggcaggcaaattgacctagctatatataggaagatagtgatagagccaactgcagacaacaccagtctttctgattattagtgataatttgttgtgccaagatgcctcccaaatgcgtagattagatgagagtgatagctggtccggagcctttgactagtatccgctacttcttatggattggcctgactgtatgggcttctagctgctcattggcagttttcttgacctgagttcatattatattccctgatgcctgtttatccttatgaggaaattggaagcattctgaatcaccttaggctgtatcctgactgaagttgtgatatttccccacatccctcttctttcctgagaaagtagaaggctcatcactttacatcagccattatttattgagcatgtatttatttattcatgcaacaaatatttattgattgatcatgatagaatcttgggcacaaagataacaagactttccctctcctccaggaatctacactgtagcctcagctctgatgcccttgtttcttcactgagtttcattattttccttcatccaggtgactctcttttctgtactttctcctcttctagattctgattcgcaaccgagtaactgatctagatgccaggatgaatgatggtactacacccctgatcctggctgcccgcctggctgtggagggaatggtggcagaactgatcaactgccaagcggatgtgaatgcagtggatgaccatggtagggatgaaaggcagggatttggattcttacctgcaaagcatgcctctgacgaggggaatagagttacgtgacccttagagaactgcctgagatccaaatacgtgagagattcactcattctttcattcatgcatttatttaacatgctgagctcagagatccaagccagtaggagatccctaattaaaatgagggatttttaatgagggttcttggacctcagagcagatacatgaaaggtgttcccatgtagtttcctaggcataacacttgatttgaggatttatgagagctgacttctctaggagagttgtagaatattctcaatataaattctgacatgtaatatataggtttttatcttcagtatgtaacagggtagattctgccatgtaggggacatgaatgcctcatacaagtgatcctttcacctagaggtcttctgcaggctaggcagcctgtactgaagtatttctagaacagaggaaaaagaagagattactttggtttttcctatagacccctacagagaactgcttcctgctgatctctggggagtttaagatttcattgtgcaagtcatagtgtcttatactaagagtaggatatgtctgtttataaaaatgtttctcccctgcaggaaaatctgctcttcactgggcagctgctgtcaataatgtggaggcaactcttttgttgttgaaaaatggggccaaccgagacatgcaggacaacaaggtacagtttgtgggctctgagcttgaggaggctcatagcagtgcctcagttataagcccattcccgtttctccttacagcttctcttgttatatgtatagacaaagatggaagcagtttgggcagacactgggtttcgagagcttgatgaggatattgggcttgtccaggcatgtgtcaggatggagttctctgccctctcagtactcagcttgcagtaggctggctatagatagcttggtgtaactctttctcttccctgacatttccttttctccagttgtctcttctgttcataatcacttctttttctcgttttctttcttttttccctccggctgcttttttttctgtccttggataccctgatgttttcctgtttgatttttctccatctgagttttttgtcctgcttccttctctcattcatcttctctcagttttctttgttttccttatcttagtcctttcttgcacatgttttgtctcttctttcactgtttcccttacttttcccagttctgtgcatgccttagttttttctcttcctacctttcttatttctaactccttttcctattatttcttatttctaactcctattcctacctttcttatttctaactccttttccttaaccttattttgataagctcagtactcttttaagtgagtctctggctcaggggcatgctttattttatgaattcccaactaaagagatgttccccctaaggggcaaaattgtttttttgaggagaggtgaaataatcttactttttttatgtgtaaatcacagatacacattcagtacattggtagaggcacagcctatctgtggtgttaatatttcatcggggagataattaggaaaacatgtctaagggggtgataataaaaaagattgagaaaaactgctatattctcaagagtgttattaacatgtgttctgtgatgggccttttctgtaggaagagacacctctgtttcttgctgcccgggaggggagctatgaagcagccaagatcctgttagaccattttgccaatcgagacatcacagaccatatggatcgtcttccccgggatgtggctcgggatcgcatgcaccatgacattgtgcgccttctggatgaatacaatgtgaccccaagccctccaggcaccgtgttgacttctgctctctcacctgtcatctgtgggcccaacagatctttcctcagcctgaagcacaccccaatgggcaagaagtctagacggcccagtgccaagagtaccatgcctactagcctccctaaccttgccaaggaggcaaaggatgccaagggtagtaggaggaagaagtctctgagtgagaaggtccaactgtctgagagttcagtaactttatcccctgttgattccctagaatctcctcacacgtatgtttccgacaccacatcctctccaatgattacatcccctgggatcttacaggcctcacccaaccctatgttggccactgccgcccctcctgccccagtccatgcccagcatgcactatctttttctaaccttcatgaaatgcagcctttggcacatggggccagcactgtgcttccctcagtgagccagttgctatcccaccaccacattgtgtctccaggcagtggcagtgctggaagcttgagtaggctccatccagtcccagtcccagcagattggatgaaccgcatggaggtgaatgagacccagtacaatgagatgtttggtatggtcctggctccagctgagggcacccatcctggcatagctccccagagcaggccacctgaagggaagcacataaccacccctcgggagcccttgccccccattgtgactttccagctcatccctaaaggcagtattgcccaaccagcgggggctccccagcctcagtccacctgccctccagctgttgcgggccccctgcccaccatgtaccagattccagaaatggcccgtttgcccagtgtggctttccccactgccatgatgccccagcaggacgggcaggtagctcagaccattctcccagcctatcatcctttcccagcctctgtgggcaagtaccccacacccccttcacagcacagttatgcttcctcaaatgctgctgagcgaacacccagtcacagtggtcacctccagggtgagcatccctacctgacaccatccccagagtctcctgaccagtggtcaagttcatcaccccactctgcttctgactggtcagatgtgaccaccagccctacccctgggggtgctggaggaggtcagcggggacctgggacacacatgtctgagccaccacacaacaacatgcaggtttatgcgtgagagagtccacctccagtgtagagacataactgacttttgtaaatgctgctgaggaacaaatgaaggtcatccgggagagaaatgaagaaatctctggagccagcttctagaggtaggaaagagaagatgttcttattcagataatgcaagagaagcaattcgtcagtttcactgggtatctgcaaggcttattgattattctaatctaataagacaagtttgtggaaatgcaagatgaatacaagccttgggtccatgtttactctcttctatttggagaataagatggatgcttattgaagcccagacattcttgcagcttggactgcattttaagccctgcaggcttctgccatatccatgagaagattctacactagcgtcctgttgggaattatgccctggaattctgcctgaattgacctacgcatctcctcctccttggacattcttttgtcttcatttggtgcttttggttttgcacctctccgtgattgtagccctaccagcatgttatagggcaagacctttgtgcttttgatcattctggcccatgaaagcaactttggtctcctttcccctcctgtcttcccggtatcccttggagtctcacaaggtttactttggtatggttctcagcacaaacctttcaagtatgttgtttctttggaaaatggacatactgtattgtgttctcctgcatatatcattcctggagagagaaggggagaagaatacttttcttcaacaaattttgggggcaggagatcccttcaagaggctgcaccttaatttttcttgtctgtgtgcaggtcttcatataaactttaccaggaagaagggtgtgagtttgttgtttttctgtgtatgggcctggtcagtgtaaagttttatccttgatagtctagttactatgaccctccccacttttttaaaaccagaaaaaggtttggaatgttggaatgaccaagagacaagttaactcgtgcaagagccagttacccacccacaggtccccctacttcctgccaagcattccattgactgcctgtatggaacacatttgtcccagatctgagcattctaggcctgtttcactcactcacccagcatatgaaactagtcttaactgttgagcctttcctttcatatccacagaagacactgtctcaaatgttgtacccttgccatttaggactgaactttccttagcccaagggacccagtgacagttgtcttccgtttgtcagatgatcagtctctactgattatcttgctgcttaaaggcctgctcaccaatctttctttcacaccgtgtggtccgtgttactggtatacccagtatgttctcactgaagacatggactttatatgttcaagtgcaggaattggaaagttggacttgttttctatgatccaaaacagccctataagaaggttggaaaaggaggaactatatagcagcctttgctattttctgctaccatttcttttcctctgaagcggccatgacattccctttggcaactaacgtagaaactcaacagaacattttcctttcctagagtcaccttttagatgataatggacaactatagacttgctcattgttcagactgattgcccctcacctgaatccactctctgtattcatgctcttggcaatttctttgactttcttttaagggcagaagcattttagttaattgtagataaagaatagttttcttcctcttctccttgggccagttaataattggtccatggctacactgcaacttccgtccagtgctgtgatgcccatgacacctgcaaaataagttctgcctgggcattttgtagatattaacaggtgaattcccgactcttttggtttgaatgacagttctcattccttctatggctgcaagtatgcatcagtgcttcccacttacctgatttgtctgtcggtggccccatatggaaaccctgcgtgtctgttggcataatagtttacaaatggttttttcagtcctatccaaatttattgaaccaacaaaaataattacttctgccctgagataagcagattaagtttgttcattctctgctttattctctccatgtggcaacattctgtcagcctctttcatagtgtgcaaacattttatcattctaaatggtgactctctgcccttggacccatttattattcacagatggggagaacctatctgcatggacctctgtggaccacagcgtacctgcccctttctgccctcctgctccagccccacttctgaaagtatcagctactgatccagccactggatattttatatcctcccttttccttaagcacaatgtcagaccaaattgcttgtttctttttcttggactactttaatttggatcctttgggtttggagaaagggaatgtgaaagctgtcattacagacaacaggtttcagtgatgaggaggacaacactgcctttcaaactttttactgatctcttagattttaagaactcttgaattgtgtggtatctaataaaagggaaggtaagatggataatcactttctcatttgggttctgaattggagactcagtttttatgagacacatcttttatgccatgtatagatcctcccctgctatttttggtttatttttattgttataaatgctttctttctttgactcctcttctgcctgcctttggggataggtttttttgtttgtttatttgcttcctctgttttgttttaagcatcattttcttatgtgaggtggggaagggaaaggtatgagggaaagagagtctgagaattaaaatattttagtataagcaattggctgtgatgctcaaatccattgcatcctcttattgaatttgccaatttgtaatttttgcataataaagaaccaaaggtgtaatgttttgttgagaggtggtttagggattttggccctaaccaatacattgaatgtatgatgactatttgggaggacacatttatgtacccagaggcccccactaataagtggtactatggttacttccttgtgtacatttctcttaaaagtgatattatatctgtttgtatgagaaacccagtaaccaataaaatgaccgcatattcctgactaaacgtagtaaggaaaatgcacactttgtttttacttttccgtttcattctaaaggtagttaagatgaaatttatatgaaagcatttttatcacaaaataaaaaaggtttgccaagctcagtggtgttgtattttttattttccaatactgcatccatggcctggcagtgttacctcatgatgtcataatttgctgagagagcaaattttcttttctttctgaatcccacaaagcctagcaccaaacttctttttttcttcctttaattagatcataaataaatgatcctggggaaaaagcatctgtcaaataggaaacatcacaaaactgagcactcttctgtgcactagccatagctggtgacaaacagatggttgctcagggacaaggtgccttccaatggaaatgcgaagtagttgctatagcaagaattgggaactgggatataagtcataatattaattatgctgttatgtaaatgattggtttgtaacattccttaagtgaaatttgtgtagaacttaatatacaggattataaaataatattttgtgtataaatttgttataagttcacattcatacatttatttataaagtcagtgagatatttgaacatgaa

SEQ ID NO: 45 - DNA, 73984 bp, Homo sapiens
acccaggagggctgtgctgatagcacgttcctcgagtttactttgctttccttgagtttattgtaaaggggtaaagttttcggatccgtcacgtgaccctgacaggtcctgcctatggcgcggcagaccacccacgccgagggccatggaactgcttaatagaaacaggcttgtaattgtgagtccgcgctgcactccgccgaaagcctccggcggcccagcgcgccggggtttttacactttccgttccttttgtaaagacggaggaggaggagaagaagaagaagaaaacggaggagaagaaaaagacgacaggggagacaaagagacccgcagcgacaaggcaagggggagacgagggaagactgggagaagacggaggagcggaggacgaggaaaggggggccagggaaaaaaaaggaattgatgtgaaatccaagcccagcgtccgcgccatcggcacccgcgctccgagcaggggttgacggccggctatggtgagtgcagccagcgcggcggccgccgacgccacctcgcctcgcgcgccgtgctcctcgggcggcgcggggacacggggacgcgggacgccccgcgcggcggacggaggagcgagccccgagcgccgggcaggaggggcgggccgcgcgccggggccgtggagccgggtgggctgcgccgcctgggcgcgggagcgcgggtcccgcgcctccacgctcgctcgcacgcccgggcccccgcccccgaggccagccccgcgtggcggggagggggctggccgcggcgggccccggctgaggaacggctccggggggaattctcacggagggggtcgccggagctcccattttcacgcctgaaagggtcgccaccttggcttccgctcatcagcctggtggtggctactgactcgccagcggaggcagagctggtgatggaagggctggtgcggagagtgacagcgccgaggggagggggctcagagcgcgcgcgcggaagccgctgccgccagctcgcgggagcagccgcagccgcagggaagggcacgctcgcgccccgcagacccgctctcgagcccgcacgcacgcctaggggtgcgggacacccgggctagaagagacgcaccttacccacctcccctcccatgctgcgggaaaagggccagagaggcttttggagttctggaaggggcggtgggtaagagaggtggtgtgtgtgactcttatgcccaccgattcaggcgcttgggtggctgccacccttacagagatgggcgaccagcccagtgcttagagtgcagagtgcggcctcaggggagcccgggggcgggccggaccgattctcactttacaggcccgggcccagcgctgaaccccaagacccccagaaactgtgcctctgggtgacatgcgctgtgtctccacgtatttagtacgttcatgtttaaaatgatgctagcgtgtggatgagcacactctcagggaaactgatctgtttccatcacctaagaagaaccatatgggtgggcggctgtggaagacacccacagacctgttttcctgcacctgggagagaagaccgtcttcctccctttttatcctttcttcctccctggggaggagaaatacaaaagaactagacataaataataaagagccacaatgggtggctctaaatatttgataattggatcactgaggtcttgaactaccacaatagtcctttttcagcattctgtgtgtgtgcatttcttttaggtttttatttatttctgtgtttattggcgacagtagttcagcatgcaattaatcgcctccacaaagaaagacaatgctttatggtgtcatcctttgttattgcaacttaaaatttctgggtggtactccggataaattgttgcctcaggtgcatggagtgcccaagttgtaaaacaaggggctttcgattgtgagtttatgtgtgttccagttgtcacccagcttccttccacaaggctataaaatgcctttgagtccatgatctgtttcaattaaaatgttgaatcaaggtagacatcaataggccccgccattctcaatttggggtattagcttcatttcaaactcactgtgagtggtgtatctaatttctggttataaagtagtcataatctttgaagctatttgaacaaaacttagaaccatttggaattattttctgaaaagaaaaaggctgttttacaaaattatcttcaactttctacagatagataaactgatgaggttaatcaatgtggattaaaatatgtctcccgtttttatcctcattcctctctctctctcacacacacacacacacacacacacaccttttattttctccagcctctgccacagtgtataatgccctattgagacgtgtaggcgtgatgtgtaaaccggattagcagtatgaaagaaagacacacaataagctggaattgttttacttccctttcatttctcatgcctatatttctgataaatttgttgctccagcagtgggtcaaagggatcatgttgctcagcttctttttcatgcaggacccaatagcagagatcactgaaatgaatggtgtgcctcctagcaaacgcaaagcttgatagagatatattagacagggagaggcgaggagagggaaggatgcaaaacatgttcaaagtctgggtgttgtaggaatacatctctatccatgagaggaaagcaatgtgggtaagaatatatttggagagagagggatcaatgcaggggtcaatgctctgttttctttcaagttcatagtaggctctgaacattcagcagttggtgacatgcttagcaagagaataccaatagcttttggcaatacataaagtctaattcccctttcaagctagtatttagacctggagtaatcaatgtggagatttctgggaccttctcaggacactcccctctgccgctttccccacccccagctcactgtaagctcaaaaaatgccagtgctcccgggtttgtgctgtagacccctcatttactcctttgtggagttaggagcagcttcccattaaaggagatcaggggtaattagcagcattattttgacaagttggctagagctgttccctttcctccagcctggggagggggtaaataaggggaggaaacagaaggtggaagggagtaggggaggggagtcaagcccagtagttttaaattttgtagctgctgaatctccccccaccccgtccccgacttccctgaaaccttttagactcattttctaccatcaccttttaagaatatacaaaagctgccaatgagaaaatagtaaggcattcttagggagccaagaaaatgtggtggatggtggcacattggcttgagttgagtcgactcaactcatattcaaggtacctgcttggaactgctgaagccctgccttgaccatcactcacatcctgtatcctgggctccccatgcagtaaaagaatattgcatcaaatccccaattcctctctccatccgaccctctcaacaaaaatactgtaggacttaaaatcatgtttgcaattccttgtatttctggaagagtattaaactcagtagacaaaattataaatggccccagggtcaaattactggaatacattaacccctttattcatttatactctgcaaaacttgccaaattacattggattttaaagactcatttggtttgatctgagaaaccagtgaaaagttaaatctcactgtggtttttcataactccaccaagtctggcttccacaattgcttaccattggaacatcccaacacaaagggcagatgttttatttcattgtcatcatttggataatctgatgtcatttttgaaatgtgtgtggtgtggccatggatatttgtagtattggaacagagaagggaggagatgtgagggaatccggagagcttaaggcatctgctttgaaaactacacactccaatgagaagtcttggatcatgactgggagaccaaaatgacaatttatgcattgagatgaactttacttggaaaggggaaatggaacactcagctgttgcttcataaaggctggcaactcctgctggctgataaggccccaagttctcacttatttttatttggtaactgtcacaaggggtgccagaggcagaagggccatttaaagggactgtcttcccggaggacaccttagcaggtctggctgccccagtctgcatctcagatctgtggaatccttgtggttagttgaagttaacaaacccggtgtggcacagcagtcccctgcacagggcatgcatattaaagccgacaatgcttacaaatgtaaataagggcagattgattaggaacaacattatcgctgggaatgtcgcactcgcatgcatcagcaatgaggcaaattgggggcagcctcagccctgaccacccaagtcgagcaggcttttacactggctcctcttccctttcttaaaacgttacagaaacaaggccaattagatcctcaaagtaattcatctctaagtatgaaaaaagcagaccacaggggaagcggcgggtggggggtggggagattaagatagcgctcgttagagccgaggctccggagtgcgtcctggaacccacgggtagaatttacaggccgggaccattgtctgagatgctgaaaagttaacccatcaaacagcgggcgagggggctcagggcactgaaagctccggggatcaatgttcaaaacgtttaggaattaagtcaaactaagggatatgggcctgagtggaagaggctttgccactgaaatgacgtgcatgtggcagccgccggaaccagaggacatgcagccgcgtgcggagagtgaggcggatccattacgggcacacagcttaccatttccttccagaattccttcttccaaacaagctatactgaaatccctctagtaaaagattgagacgaaacactaatagttttgggccaaaacgtggtggagaagtttgaaaagacaaacatagcaacgtgtctttggctatatggttccttgccctccagcaagcttgaaatataaaaaggctaacatgcaaaactaggggtactacccccctcccccagtttttaaaaagcaatttccagaagcaaacacacaatggttcgacttgaagtgtcggcataaccattcagtaagaaaagctagaatagtaaacctcttttcctgttttgtgctatttatcaaacctaataaacatcaggatcgtactcaaagatgaaactggcaatgtgtggagccgtctgagctctttatcaactcagtgtcattttcctcgcatgctgcccgcctgctttccgagtttccgcagcccttccctgaggcactcacaaaatcacgtgctccttaagcggtctgagttttgaatttccgcgctggcccggtgctcaggtccccctccggatcccgcgaacgcccccaaacacctccaccccgtctccctctcttcctcgggacatcccgccctgaccccggcaccgcatacggtttgcgggttagggggtcgggggaagggcctccccctgaagccggggaggaggagaggctggagggaaggtggccaggctggtgggggaggggagattgagggagggagcggggcgagggaggaaggagaaggcgcaggccgaaggaaggaagcggggaggggaaaccgccggggaggaaggaagggggcggggagagccggcggacgggccccctgcgggagccgcgtggaccgccccggtggccggcgcgccccgccgcagcccccagcgcgcccgggcagccagcgcggggccgctgaatgggcagggactcgtgagcgcgaccattggccggtcgcggggaggcggcgcgggcattgggcagcgtaagggggccggtccgccttcaggaatgtactacggcgcgtccggcacgtccgtccgcgccggctgggcgcgcgcctcgcctgggctctcgggagaccgcgctggaggcccggagccggcccggcgcatccgcctccctacctactctgccccggccgcgcgggcgcggggagtccgggagccgggcgcgcgcgcgcaccgggcctcctggcgcggggtcacgtggccaccggagctccgccttctccctgctcctccccctttccctccatctgggtttctttctttcctttcctttctttcttctttttttttcaatgaacatacaccgtgcgcatcttaaagccacaccgccccatttcacgacttcactagacttctcgctactgccagtccctctgcagttcaaccccgtttaaaaaaaaaaataaagtgaagcaaatcaagggtttgcgggtcgggttcctaccgcagggaggaacgtaataacttggaaacgtaagaaaaacacattccactttccgaaaacaaaaatttttttaaataaaaagcctagttgtgtagacgtgtctggctccagaatccacctcaaagggtcgcgtgttttccccctccgcgggaagcgaatccccgggatgccttggtgacactggacgcggtgtcgggacgaatcctcgcgatccgcgcacagtttgttttcaatgaatccagcatcggggcatttataatctcctacgtcatactattattaaatataacatgcataccgagttttgtaaaaaaaaatactgactatataaacatctggttaataaaaaggggtgtacaaatgaacccaaaataatcaggaaaactttactctctcaaggaaacaattccgtttctctaagttgtaaaaaaagattctgttgtttctcttttacttatgtcacattcgagattcaaataaaaacgcctctgcctctacaagactgcttcggtgtctggattccacgtttatagaacactgactccttcaaaccaagactgtgttttttttttttttaagttggggggagaaagcggctggggggcagacggattttaagaaagatggcttttcccaacgtccttgctttcctctttaactttccattctgtttatcttaatgcgaggcgttgttccctgcaagagcctaagtcttccctttagttataaaagaaaagagaagaggaaaaaaaaatctggcacacactggcgcactatccagcacgctgtcattattggtgcaggcctgggaatgcgagccggacctcccagtatttgctgcagcttgaggccaaggtgcctctgaaaggcttttctttgaggaatttcagaaattgtttaagcgcttaaaaaaatattacatttccccccgtgtctaccgcgaggcaaatgttcgtgtgtgtgcgtgcgcgcgcgtgtgtgcgcgcaaaggcatcccacaaaaagaagacactgttgaaaagaaaaggaataagagagaaaggagggggagcattccttaatggaagtattgcatgcgagaaggttggcgctctcagaggctgccccgaagccgaggatgcacacactgggttgcctacctgggtggtctctctactttggtgagctgttgctaagcagctaataatagtcatgtttgctgagtaatttctgccctccgcgagccaatcgcgtcgcagaaacccaagccatctgacagccccgggggcgggagctccagcctttttctctttcgctcgctctctccccctccaccccctcccctcccctcctcctcttctttctccaaatggagagagttcttttttttcttcttccatctcatctattgaatcaaggagctgctgcggccgctgcccgctgcacacacacagagcggagtccccaggtcccgggagcgagagaggcgcgctgcacggggacagaatggtccagcgggttgccgaggagcacaagaaagcagagtccgggaccgagcagccaccgcgaacccagcagccagagcccgagcagcccgagcagcagctcctggagccgccaccgccagcagcagccaccgcgggagcagcggcagctgcggctgcccgggcccggcagcgctgagacccgccgggcaccctcggaccccgcggcggcggcggctctgcgcttgccctccgcggccgctcgggcgacccgggaggcgccgagagagccagcgcggccggcgggagcagcggggattcgctggctctttctgcagtgaaggggtcgcggcgcggggcggggggcgggtagggggagttggggaccgcaaggagtgccgcggaagcgcccgaaggacaggctcgctcggcgcgccggctctcgctcttccgcgaactggatgtgggcagcggcggccgcagagacctcgggacccccgcgcaatgtggcaatggaaggcgcagggtctgactccccggcagcggccgcggccgcagcggcagcagcgcccgccgtgtgagcagcagcagcggctggtctgtcaaccggagcccgagcccgagcagcctgcggccagcagcgtcctcgcaagccgagcgcccaggcgcgccaggagcccgcagcagcggcagcagcgcgccgggccgcccgggaagcctccgtccccgcggcggcggcggcggcggcggcaacatggcctcggctggtaacgccgccgagccccaggaccgcggcggcggcggcagcggctgtatcggtgccccgggacggccggctggaggcgggaggcgcagacggacgggggggctgcgccgtgctgccgcgccggaccgggactatctgcaccggcccagctactgcgacgccgccttcgctctggagcagatttccaaggtgcatttcagactctctcctcccactttctcttccctcctctaactctttgggatcgcccccgccacacacaaacacacacactctcttcctctctctctcacacacacacacacactcactcacacctctccaggaaaagcagcagacaaatggggattgaaaaattcaaaccctccctctggtcctgggaggaaagggctgtctgaggtccgcagggggtggaggtgtgtgtgtgtgcgtgtgtgtgtgtgtatacacacgccctccctggtgtgccttttccggagcactggaaagccgtccacggcggaccacctcaagggcggccgcggcactgtcctgccccgtgccccctgccctgaacttcttcctcctgcgcccctgcccctatttgcagcctaaactcctgtacggctgccacatttcttaacatcttggagggggaggcggagtggagagaggcggagagaggaaggggggagggagccgaaataaaggtggtttccttttttggcagccagttttggttttgttgagcatgaaatctctgctcccttaaaaaattattctcggaaaaagatatcccccccgttttccaggttttgagccgcctctccttagggcctggtcgggggaggaaaagttgtaaacaaattgccaccttaaattcgcggtgcgagtctgcggagctgccgggttcattgtgtttacgaggctcgctgaaatgtgtggaatccagggaaggcgagcacccagacgggggcccgccggggccgcggccagcgccggggaaatgccgcgccggggagcagcctgcgccggcctgagcccttccctttgcactcggctgttttttacgtttaaccagaaaggaagggagaggagggaaagatccatgtggctgccctcttccgatcacaaatattgtcgtaagttgcagctggctgccccacttcctaattcagctcacacagcctctccccacgctatggaaatgcgtcgggagtgaactccggcggccgcgctcaccacgtggatccccacttactaccattctcggcgggggtccagttgggggaacccgcaatatgttgttccaaagagcgctcgcccctagcgcccgtccccgagggtgatggacagagcaggactggtttgctggctcctgaaccttgggctccatcgctgggattacgcagcccctcccttctcagctctggggtgaatattgtctgtgtcgagtggtttctctcctctctacctcggcttcctcttctgtattgcagccccagtgccccaagtcgctcagggatcccgcgggtgggggcgccctgatgtccccgaggtgcagctcccacgctgcggcccggctttatgaccgagccccccatgacgctcagatccgccggggctgcagtctcgagggcgagtccgtgtgccgcggccacccgcgcccccacggctgttgggggctcaccgggcgggtgcgcgcaagcgggcgtgggcgcgcgggccgcgactccccggcgctcactcctcccttctgcttcgtccccaggggaaggctactggccggaaagcgccgctgtggctgagagcgaagtttcagagactcttatttaaactgggttgttacattcaaaaaaactgcggcaagttcttggttgtgggcctcctcatatttggggccttcgcggtgggattaaaagcagcgaacctcgagaccaacgtggaggagctgtgggtggaaggtaagagcgcccgccgcggcgcccgcgcccccggcccggtccctcctcgcggttgatagagatattcgccagcgcacacctagagcctggctgcggccggcgaaaccccctgcccgcacccgggggattgtttattgtttgggcgcctggccgggagccaggcccgcccgacaaaggccgcgctgtaatctactcggggcgctgcgccggccgaggtgtggtgggagagagcggcgggggcgggacgggggcgcggggcccctccgggacggaccactctgcgcgccgggggccccgggcccgccgccgctgccgctgtccgcctgggccgcgccccgagaggcgccccggggctggcctctcccggccccgctccgcggcccggctttcttctctcccccacccccacccaccgcgtccaaagaaaaaggagtcggggagagccagaggccacccctccggctggctggagtgtgcgcgcccccggcggccgcggccgccgcgctggggagggccgggggcgggcgcagcgcggggctgcggaggcggcggcgtgtgtggtcctgtttttggacagctttcaactctgagggaaaaaaacatttgtctcaaggtacaaaaaacgcggggtgggggtggaaggagtggaaaaaaaaatagtaaggcacagactggaacgcatgtttgcaaagtagattaatgtttcctcgcgggtgggggctttttacatggaattattctgggggaaggctgcattttgcaggcaaagaaaagaaatgttttaagaacgcggggttgaagggacctctcagaggggttctgccagtcttttatccacgttcctcagttttggggttcttgagaccttagcaaagcagttgcagatttaaaatagatatatattttttcgaagacaaacatttttacattattttggtgacaaaggtttcaatttttttcccccgctggtttcttatttatctttttggcaagttccaaatcctgctatttggaaacactttaaccctaaacaccactttgggcatcccttaccttacaagagggtagtaggggagggtagaggtgactaggtagataattcaaaccaaaatacctggagcattcctccggacagcatgtggaagctgaagagttatgcgcataatcgcttcagtgatccctttcaggatgctgttggagaccttgaagaatatttccttaatctctccttgtttgtgaagattcagcttgcagagttttgcaagcctggggtggagttggagtatttagttgagaagtgacaattaaaataatagtctacataattaagacaaaacattcctgccttaagtagtttggtaattaatacaaaagcgttctttggattgaatccatggagtaatttacctcagttcagcgattcagtatcactggtagataaaagaagggttttatcgagcagctattatgctcctagcaacaagtttcttgagcacctatgatgtccctagcactgtgttaagcaccataagagactcaagtgtgtgcgacactgcacaatttaaaactattagaattcgatgcatttggactacatttgggttcacagctgaaatgggctgtgaaagttacaagagggtggtagggggtggggggagagaactggagacggtaggggaaggagggcattttaggcatgggcgggacaccagcaggggccccagctgaggagtttggaagtgatgtgattggctagactgtaggggcgctgccgtagattctaggacagaatagggcatgaggacagggagggccgctgccgtagattcttggacagaatagggcatgagcacagggagggccggctcatccaccacttgatccaacctgtatttgttgccatcggatgaggatgacaaaacgtgattttgtggtgttcttagcaagagttttcagtggacctttgacatgttgaaggagatagaatgtgatttattttcttaacattgcatatttctggaaataacttgctttctgcataacacgacccatttcaagtcctggaaggagatgcagtgtgcttcctagcagttttatgggagctgccagttgtgtagtgagagggagtaaagtttttctttttcaatggactggatgaggacacttctgaggggcacactcactttgcttacttttggcagtttcagcatgactcactggtcttgggccaaatgttatttactcagtactaatactgtcacttgttgagcaactgccatgtaccaggcatttgttatatattatcgcatgccttacgattcaataaaatagctattattatcttttttttttttttttttttttttttttttttttttttttttgagacggagtctcgctctgtcgcccaggccagactgcggactgcagtggcgcaatctcggctcactgcaagctccacttcctgggttcacgccattctcctgcctcagcctcccgagtagctgggactacaggcgcccgccaccgcgcccggctaattttttgtatttttagtagagacggggtttcaccttgttagccaggatggtctcgatctcctgacctcatgatccacccgcctcggcctcccaaagtgctgggattacaggcgtgagccaccgcgcccggccctattttgtttttataacatgatagtggatgtaatgtctttatgatgaggattgtcccattttacagatgggaaactatgggttgtctgtttgtctccaggtctactttgcctactaatgacataagtcacttgttctgttgccctgtccttgatctctcattcattcattcattcattcattctgtgctagattctccccctagagaagaagcgacagtttcataaatgcagatagacccaactagagaggtgactatacaacagtagccatatagatttaatttcattttcaaagcagaagtgattgtgtagagatcttgtttgtgacagagtgagctgagtgttcacgtcagcagtaagtagtgtgagcatttgcattcaggagtaagatttccctgctgtcctatacctcagtggacgtccgtgaattgaagtgagtaatagctccacatttaagttcattttgtgcatcagtctcatagataaattcctcatcactatcagcaaagaaatctgttagatgctgctttcttggtaggttgttcttaaggttctagacatgaatttttatatgaactgggcatcaacagagtgcttgctacacaaacgaaatggatagaggtagcatattgccctagttagaaaacaacagaagagaggaaagtatgagattttaaggggagagggatgctgagggatagtttggaagaagctccttctcctgcggtttaaaatcacaggagcgtgtgtgtgtatgcacattgtcttattctgcatatcctcctatctgccaaaggcatgttaatgttatctttttaatacagccagcaaattaaagggatccactcgaaaggctgtgtcttcaaattgactttcatgctttgtttaacatgctggggaaatgtggctttataaagagttggctttataaagagggcagaatacatcagccacaatgtgcagactaatatatgctagatgagaaagagtccgtgtgtgtgcatgcgcgtgtgtgtgcgtgtgtaggaattggtgataagaattattgtattctgttgttaaaatgtccatataatgattgccttttaataaactgtcaattatatgttaagataccagcttgagttttagggttatagtgtttgctaatcaaaattgtcaaatcagtttcacatatgtgcggagtaatgaggtttgatagagaatatgttgactgatgtagtggacatctgctgttgcagaaacacatgaccatggcagcaaggtgggggagaaactaattgtcattgtataaaaatagaagcgttcattctgcacatgttctcagtacctactctgcaccaccattgcagaaagctctccagagagatgttggtgaaaagccacagtctctgccctcaggggaactccatccaaacattcagcaggtacacggactggtgtgtgggtagttaacatgaaggacagcagtgccaagatggcaggaaaatcggggacatcttccaggatggcctcaagggtggaggcctgagctaggcacaggggctggaggggagagggtagggggcattcagggcagaaggaacagcataggcaaaggctcagagaacaggaatgtggcctcctggagggcagcctccctttgtgggtcgttgaggttgggtgggagcctggaagctgggctcgtccctcagggccatttcacagaagtctccctgcttggctgggggctgtcagctcttcctactagccatccctgtctcacgagtgtgctcacgtgttggcctctagtgttttccctggagccacgaatgcttcacctggatctcacctttctgggcacagactggtgttatttttaatcttgcctgtttctttgttggtatttcctttttgttaagcagttttaacccatctccctcagtatctatttcttttcatatcagccccctcactgcagccctccctcagaacaagtttcttgtcaagcttctccagcgatagaacattcatttatttctttgagctttttgttttttctaaaagcttgcccagctcctggcctccttttctgcagagggcagcagccttgtaatgaatccatattgctttggtgtttggatgttaacattgctgcaggccagcgtcaaggaagaaggaggcaagttgtgactttgacttttttttttttttaagaaaaatagaagaaattgttttttaaaatacatgcttggtatgtgtaagtgctttcaagtttgtaccttgctagtgttaatgctttcagtgttcttgaactcaggcaatcagttgtaggagataactgagtttcaccactccttcaatttggagcaaggtccctcaacctcaggactattgacattggggctggatcatcctctgttgttgggggctgttctgtgcactataagatgtttagcagcatcctggtttctacctactagatgccagtagcaccctcccagttgtgacaaccagaatgtttccagtcattgccagatgtcactgggggagagggtgtcccaaatcatcacgattgagacccactggtttagatgataaaaagattttgattggaagactcatgctgtgcagatggaagacgtttattatgatggagttgtggctacaatgcattgcagagatgcaagagtattaatcttctttaagataactcccccatcccattcctgtatttatagacccagataactatttttcttagaatgacattaaatgtcaaagaaaaacaccgtgatgggtcgaaagaggaaagaggccatggaagaaagaaataatttatatttgggtaccttttggtggggggtatctaaatttgcagaaagactggttgcacctcaaccccagtagcctgaaggtttttagcatggttgactttctgaaaagctttaatagaagacaccactgcctttgtgcatattgaaataacagctccttcagaagcccggctagtgtgtgaactccttggtggtctcattctcctccagatgtttctgtcacaaaccactcccccttgtccccccaggagcccttgtggagcagaaccaagggacagcaagggaccagtcccagccagaagggcagaatggattctgctgtcactgcccttccacagtgagcacctggtttcttttctctggggttgccattgtgggggcatttcacaagggacaggaagaaaaatgcagctcctttctgctccctggacccccatacatggtttagaagggagaatatgtttataggtatttattagtttctactactgggtatgcacatttaggtggaagcagttgtgatatttctttcatatttggagaaaaacgattggaaatgagaagccaccaatgattgtttaaaaaagaacaaatagccctcaggtgtcttctacacagggcagttgaccctgcgaatcctccctatctctttgctgtctgccattcttgacccttcaccaagttgagaggacaggttgggtaatggggtgtttcagatacataggatgccgctcagaggttccagaagatgacagcttccagatgtatgaacagcctgatccgtgtgtttagattatgcaccacagctgatgccgagattaatgctggctggacaagccatgggagatttgtctggtttccacaatgccatgtttatgtttcatttgagtttctccttcaaagctgacctgcctgtgaccctgggctctgtccactcgggcaagctgaaactcgggcaagctgaaactcgtctgccctgttctcctgcttgtattggggtaggggagagtcacaattgggcggagaaaggggcgctttggtggccgccttctgcctcaccatgccagctatctgcccagatttagcccctgatgagtgttcagttctcctcggggatgtgtttcactgtaaaaggttttttggcttttaaaacaaatatggaaatattataaaataactgtaaaggggaccagatttaatagaagccactttgcataaatgtagtattttaacttctggcactcttttgacactatttagggggagaaaaagttgagggaatttcagctatgtcagacacccccacataataaccatggctgtgtcatcctattataatactattaatgtttcctgtgcccctcgctggctcccagaacctctgctgcctcctccctctctcccctgcccccttccctcctgccccttctcccgcccacccactctaacctgcccacgtcatttccttccaagtggatctctgcagttactagtgtgaactctgaaatggtagtaagtctggctaatcacaacctaagaggagggaatgagaacatttattatttcaagccagctgtgggagatactagatacagagctgccatttgcatccttggcattcttattttggttagggttggttccaagaccacactctttgatgggctcttggcagaagatgtgattcccctgttgaagaatcatgactttttttaatggactgctgaggcaactttaaaatccattgacaagtttcttcaacccataccacaccgccagagagagtgggaaataagtcttggtcccctgtgcttaccgtggcgcatggacagtggaagaactgggttccctagcatttctgagacagtgagtggagcacaaaccatggctttccctcccaggtgccccacttcaggtcttccttgcttagaactcccaccaaagccagtgggcacatggagcttggctagattgaagacgatggaattccttatccagattttggccgactctgaagctttatgtgttccatcctcacgagaggtcttggttgacatccagagaccagagggccttgctggtgagggcacttctgcctgcaggaggaggaagctctgcgggattctctcagtgggaacattccttgaatacacagatataatcagggtcatcaaaatataaacacttctgttactttctcttctaatctttgaatttgggtgcttatgataatactcactggattttttttttctctttaaattggatttagggcactttttttcctttacactgcaatgtctaatgccttccgtacagcagaatactgccattgagaaactgctgggctgtggtggaggattttaggagcctggtgtacaggaagatgcgccccatccttagtccctccaggagggaatatgactgttccatttggggtttagagcatggctggaaaaacagctgtcatgtgttagggaaactgtattgttggtgggcagtcagatacctgctaatgaatggcaagtttgttgttggagagatttataatgtgggggcaggaccttatttctaatccagaaacccaggtgtgagttggcccaaatagtccactctgcatgtgggtcccataatgccactgctatgaaagcaaggctagtgagaagcaagtccccataccacagcgcaagctttatttattattgttcggataaatgaaaagaagcagtagacttacccaatttagcaaccaagatagttttcagttattaatgagacatgtataaaagtaagcaaaaggaactggaaatgggctttgttaagtcaatgtgcatgattttttttcccccttaaatcattgcttaagggcttctggcccctagctcaggaatcctgcccaaaaatgccagatgtattacacagtcaagtattgcaatgtaaacaccactccgtgccacgaggcagggtggtccatctcctatttaagaagagtgcgagattgagaggatggggggtgggggggtaaaccctctgctctgtagtgagcccagtggtggttgtgtcatttgtgtttttggctgcacagtcaagatttgaaactacaaaacccagataaacacattggaatggcaaagaatagcaacttgaattgggatgccaaacaaatcaagatgtggcttggatagtgttgcttcattgggtcagataagtttataaaatgtgggacagaatggagggtggggagagacaggaagagcgctcttgtcacagcagcatctttaagttgcatgagcatcctgttattcatttgctggtggttaaatggaaaggtgagtggaagcgaggcggagagagcccgagcctccaagatgacctcctccgtgagaggaagccctcccgggtgggtgcaccttccaagcctggaaaagctgatgggttgcaaagccagtctggtgttctgtggcactgagggatgtagcccacgatatgttctgaagtaaatggctttccagttttctcctgctttctgcatttctgaagtaagaagtctgctaatgatgattgttcggagctgagaaagtcactggcactttgggccaccctccggtataacgtgtcgtacgatgctgccagcaatgacaggaaattggagtacccaaatattacctatccttccagatagcctaacatgaagcagccctgagagtgactacactcagggtttttaaaaattaatacgaacatgttttgtgagttaggaagaaataggatttcagtttgaatttgcggaattgttgaaatacctgcgccaatattctcctgattaagaaatttattctacagagtgatctgagaaaacggctttaagaaatagtgatgataaaaacaggaattttgagatgaaggaaaatgtaggcttcttgactccctctttctcctcccaccgctgttttttttccttttgtgaattcttccacattcccacccccactccctgatttcctctgctcctttactgggaaaccagcaaccttcacaaaatagactcaaacatcacacagcctctttttaaatagaggctttctaagagaaaataacaaaagaatttttcctagctgcctaagaaattctttcttcttactttattttcctcatgagatttacacattgttgtaataagtaaaaaatgataaatatgataccatcattttggtctacacatgatccagaaaaaaaaattgcacatgtttaataccttgcttaattgcaaacaaagcttgcaatttgagagaattgggattagggctaaatatctattaactgctctttctagagatttggggactaggatgacccttttttttttcttttttttttttaataggctacagtttcacatggctcccaaaagaaatctctctccctttttgtttcccacaccaattgatttatcattttgcttgcaagcagatccagaatgttagggcaagaacacactcacttttttctcgtaacttttttgttgcggaccgaaaccagttgacttgaataaatttttctgaggcctgaatgtagccagcaacgtggaaaaatcttgccattcagggccgtctgaatgtacatttcagccacacagtaagctgcattgggaggcgctggactgctaaatgcaaccatttttcgcagcagcgagttagacaggtgattagcataattagcaccgagcagctatacatatggtaatgctgagtgtgtaaatgccagctgcggtgtaaaatttatgtcaggggtcggcagggctgtgcgaaagtattgtgttccagctgcaggtcagggccgccaaagcttacctccttttctcttgttggtgaatacgccaaacagaagagaaagacagaaatataacagatacggctttgatgggacagcccagttctgtgcaagagggactgctctataaaacacacacactcacacacacttgcagaaatcccattactttctgtagaaatcgtgtgtgtacttcatgcagggtccagatgagtggggccgggatggaggtaggtaaatgattccctgggaggaaaaaattcagtcattgaagttttaaaaggagttaaaagttctgttttgtttttcttcccacccatccttttaccccccacaccattccctccaccactctcctgcccacattgtcttatttcacattagatggggggatatccttgctggatgggatagcattggtcctttagaagaggaggaactaaccgttctggaggtgttagccttgaacaaaatataaggtttcagcagtgcaactcttcccaaactgcttgactagctttagaaaggggctaaaaaaagcttttgtgggctttttgttcttcctctgggtagctatacttactcgcctacctatacttactccccctacctccactgtcagacccaccaaattctttatagatttaaaaaaaaaaaaagaatcacatgggtttcttgtttgaaaggatagtcttgaatggctcacatactttgaaatgcatgatgcgggaatttattgctatgatgagtttatacattttgcacttgaggtattttctctgccacgcccccacctccacccttccgttttttggttggtggctataagaagtggtggtgttgacagaatatagttcacaccatgctgacccggtgatgaaacttcctcacggcaccagggggtccttatgtactggcccctaatccagctaatcctgatggcaacaaaatcatgaaagtggcccccagtgacgtgagtctccctgcacagatgcagagggaaggaacagtgcaggagataaatgaggccagcgtggtattcaccggaggccagggagcctgcgtgcgaaggtggagactcgcattgtcttctcccccatgtcggctcaagtgggaggccaatgaagagaggcccaggctggataatggcaagaagactgttcagagctgagaggtgatgtcagccccacagaagctgagagaaggaaactggggttaatgttatgcaatgccttgagtgctgtgatggagagcctgccgtggaagcacttgggttttgttgttgttgttgggtttctttctgtttctatttttttaatgaagacttcaggaggtttcaactaagcttgatgaaaacacgctgtgttggttcctgggttctgctgcctgctgctgctggagtgtggcctctgagccagcgcgcgctcgtcatcacacctctgggcccgcccacttcctgcagagcgacgggacctgggtgtgcatctgcctgcctgttgcgcttgagcggcctggttgcacctgaggttgtggtagaacctgggacagttcccagcttggaaagtacgctgttccggatggaagacatttccgcctgtgctctgcaggaagtcagcaacgttcttgggcctgtctcaggtggcgcggtgcacagccctcatttgccagtgtggcaagtaaccaatgaagaaggggcctcctggcagatgcagcgtcgtctcgggaactcgtggctccttgggagctggtgggagctgcgacaggcagcaggtccagcgtgggcagagtgccgggctgacctgattgcatctgacagggcgagcaggtctgcgtcagggaaagccattcagagggagcagcctgggcaaggctgataacagatggcactgccagcagctggtgggggcggggaagcttgcttccggcgcatgcgcgttgcagaaccccgcgcgagcgcctgcgcactacctgcgcccagcctgccacatgccccgtgcggtcccgtgcggttccgtgggcaggtgggggtgtccttttctcgttatgctttggtggttgacctctcactgggctcacttcatgaaggcacattctctttgggctgattgtagcgtttttcccatggcaacacgcaggggcacaatctcataaggaaaaaaacggcccagaaacttggacagcggttggctcctcctgaataaaagagatgggtgggagaggactaaaattcacagcccgtgaattttcagccaattgctcacattactgaattttcttttttttttgtttttcgattataaaaaagaggcagtgctaataattttgcagttacacccgcttagagatttgtactttttcggcctcacagtaagtaaatgcaacattgaaaggaggacctgagcaactaaaagaaaaagaaaatctctctagaggctgttagataattcatgggattaatcaaatgcaaatgcaacgcttgcatatacacagaccctattttcctaattggactctgagtgggtacttttcaggctgaaagggtcatttgttttgactgattgactttttgaggctttggggggaattaataacttatacagatgactgcctgttcccaaggctctgtattgagactgcgcattcatttattcattcagcacacttggtgtgccatgcccctggtgcccctctgcgtccctcacatacggaggtgcatgggcaggacttgaattttgtggaaaataacttcggttggtccctcagatcatctttatgtggatcacaataagcttttgctaaaaggtttttgtgtgaatgacacagaagtttcttaagctctgtgcagaaggctgtgctgaggaggggcacagcagggaagcgtgatgagggaaacatctcttgtctacagtggattggaatcatattggcctagaagtatgggcctctgggtcagctggcatcccacctgagctagctagcctttcttcactttggaaagttaagcctggcttgatttggggatgagaggatcagcagagcttgatcaaaaacttatttgcagaagtgatgcttcttttgcctttcaaagaattggcttaagccttggatttctggagaataagatggcagaatttgcaggtaaagaggcttagggctgcatgttctctgtgtgccttcatctgccccctctaagacaggactctctggggaccagaaggaaaatgaggcctgtccactgtgacccagggagccctactgaaaaaaatgcatctcctcactggctgagaaaagtctttgatgcaacatggttgtactttaaataaaaatacggattattgtcatatttcacgcattctaaaattctagctgtgagcgtaatacaggttgagtatcccttatacaaaatgtttgggaccagaagtgtatgggattttggatttttttaagggggggtgatattcacacataagcatgatgagaaagcttgaggatgggacccaactctaaacatgaaatttgtttatgtttcaactactttatgcatctagcctgaagggaattttatacgatattttaagataattgtgtgcctgaaacaatgttggtgtatattgaactgtctgaaagcaaagatgtcactatctcagccacccatgtggacaatctggttgtgtggcattcccatccttcctgacttaaaatttatatgctgccgataagcaatcattttcttaaactaattcacacctacgtacttaccagtaaaaaaaccacgacattccattaatgcagtgaaaaaaataatgtgttcagggtacccaagcagcacaatagcatcaccagatacctgcatcagtggctaaacaacagcagcttccggtctccacctgcaatgctgtgttttcactgagaggttactgtacaccatgttttatttttttaggtgagaagaaacatcagaagcagttgaaggatcagggagtgggttgtgtaggggcgaggagacatctgctggatggcttttcagaatgtttcctccagcatcaccggcctcattaacaatagtttctgtcttaagacgtctctctttgattttatgaattgacatgatttcctgtttggttgtgaatgcacgatgcgttagttttcaataagcccatcacacatttttaccaggtctgctatagttaactttttgtgcagttgtaacatgtcatcttcatggttgtgagcctgttttgactgtgactgattacatgaggtcagatgtggaattttccacttggagcatcatattggcactcaggaaggttttggagcatttgagaccttcagattagggatgctcaacctgtctagtgtgctctgtggaatttggcactcctaggctacctcctgctgtactcatgttctcagctggtgctcagaaaccatgaggctcgcagggtagttggactctgggttaaagggtcagttctgcctcttactaataaggtgggcaaccttgggcaagccacccaaactctgcagctatgccccctcccctgtaacatcaggacagtgaaacaatgctctgtgacaaaggcatgggtgaactgacacttgctccgctcttgggtaagggtctgggaaatttcacacacattgtcagctaaggctctcacagtcctgtgaggttcatcacagcatttgttatccctgttatcctcagcaaccaggaaaggtggctgaggctcagctgtgtcagggacttgtcctagatctctctgccactagtggcaatgctggggtcttccggtttccattctcactgcctgtctggtacagctggccccagcttgatggaggagcagcaatgatcaaaatatttccaaagacgtaaagaatatggtctcaaagggctttgcaaatggaaagcaccacccaagtataaaacgttattttgtgtctcaggatcctgagataatgatttttcttgagtcttgttcagaggggttgttattttattgttaatataaaaggacttcagaatatgatgaagatgcatatgattatttttatagtttattagtattattgatacataatactgtatatatttgtggtgtacatgtgatgttttgatataagcatatgatgtgtaatgatcagatgagggtaattggaatgtccatcacctcaaacacattcatcatttttttgtgttgagaacattctaaatcttctcttctagctattttgaaatatacagtgtattgttgttaactgtagtctccctactatgctatggaacactagaatgtattctttctacttaactgtatgttggtactcattaacccacctctcttcatttcccctctcattcttcccagcctctgataaccctcattctactctctaagtccatcagattaatcttttttacctctcatatatgagtgagtacagagatgcctatttttttttgcattgagtttgtttttaattcatatctctaccaagtagctctcatatctatctttcttttgtgtgtgtgtgtgtgtgtgtgtgtgtgtgtgtgtgtcacatagaaggttttgtttttctgggttttgttttgttttgaagtggggtctcattctattgcccaggctggagtgcagtgacacagtcacagtgcactgcaccccccaactcctgggctcaagcgatcctcacacttcagcctctgaagtagctagaactaaaggcagcctccactactccacagctatttctttaactttttatttgtagagataaatacgtttatctgtgttgcccaggctggtctcgactcctggccttaagtgatccttccaccttggcctcccaaagtgctgggattacaggcatgagccaccatgtccaaccatagaagcttttaattatactctttcattgtagaaaaattgatagaaataaactcaaaaaagcaaagcgggtaaatattatccatagtccggccaggtgcagtggctcacgcctgtaatcccagcactttgggaggccgaggtgggcggatcacaaggtcaggagatcgagaccatcctggctaacacagtgaaaccccatctctactaaaaatacaaaaaaaattagccaggcctggtggcgggcgcctgtagtcccagctacttgggaggcttaggcaggagaatggcgtgaaccctggaggcagagcttgcagtgagctgagatggggccactgcactccagcctgggcgacagagcaagactccgtcacaaaaaaaaaaaaaaaattatccatagcctaccacacagcaaaaatggctattaacttggttccctatgcctacatctacataacagatactagatttaatagttattttcttctgcactatttcacgaacattagattattttaaaaatatgttaggactttgatcctgacagtggaaaaaagtcatgcctgaaatcccagcactttgggaggccaaggcaggaggattacttaagctgaggagtttgagaccagcttgggcaacatagtgaggcccccgtatctacccaaaaaaatgaaaagttagctgggcatggtggtgtgtgcctgtagttggagttatctggggtattaggggaggaggatcgcttaagcccaggaggttgaggctgcggtgagcagtgattgtgccactgcactccagcctgggcaacagagcaagaccttgtctttaaataaaagaaaaagaagggggaaacctatttctccaagaccatgaccttcatctcagtcatctaaaatgggttctgtgggacttcctgagctcaaagcttcacacttagggatgataaggaagacagcaagataatgaacagctttcagctgtcattcagcagtgatttaggataggcgtttgctagggtagcaaatgtcagacgagtcagtaaaattgctctatcctgaagggtttctgtttctggcagcttgctccagagtgccttgggtcaatactgatgtcagaatatatgagtgtcgtgcactttatgacacagttatacccgagagggagctgattctaccagttcacatggtgaatgacacaagacttaattatggtctcaccaagctccgccacacttgcctcccttctctccctgcaacaagccaaacctgagggctttgcagttgctggttcttctacccagaacgctgtttctccagctcttcaaagtcacctaaatgttgtttccctttaggtcttccctgctatcccatttgaaatatcttttccccttccccactacccaacatggcatcaccatcttcgttttctgcatcacacttgtgctatgaaggtatcttattgttttgcttggctgttgcctgttcccttcactgaccagcatgcctcttggagagagactacgctgactggtttcgtccaccacatccccactgcctggtcaaagtacccacccacccacccacaaatgcttgctggatgaatgaatcatgttacagctattggtcagataaaatgggtggcaactaaacttcattaacgtttttgaatcattttgcaaaacattcatatttggttaaatataagatgaaatattagataaaatataaccatataatatgtaaaagtgaattgcatttaatagtatatatggcataggtggttgagaaaaccgtagacttcagagtctcaactctagttgcttggccaccctatcatgatagtcttagttgaaacatcacattggcaaaatatttgtgttcatcattagagcaaagagatgggggagcgacaggttttccaattccagagaaaggacaaatctatacctttattaaaatgtttatgtaaatatacatcttaaaacatctaaaaaggggacatgatggagaccctgaggtacattttatatcttgtagaaaataaatgccatttctgaaacaccctgtgataaaataactgctccattatgaggttggtctggaagagtctggtaaaaatttcttagcagcacaaactttgtgtttggttttgccatttttgtgcacactgcactctcaggtcacttcgaggattatatagttaacaggcggctgctctgccaaggctcgaggggcagaatcttgctgaagccaggctgtctgtcatggactgctcctcactataacggcacctaggtcaccataataagggtggggggtgtgctttgttgctgctgttttttaatttcatgggtttaagtcacctgatatgttaagcttcagtaaaggtgcaggaggtgcaactttgtaatcagaatgaaaaaccacgtgcatgctgatgttcgaggaggcagtaacaatgggaatgatttctgggtttgtggcattagatgtgataacacaaagaaagggtgagcaaaagctgcattgagctccttggtgggcagctctgcagctgtgacctctggactcataactggctttttagcctcatacagcttctgcacttctaggggatgtgggctggctcaaattcagttaattggttggaagtctgcgtggtgttaagtactgtgctttctgctagagtgagcaagcccctgccttcaggcagctttcccagggcttgcagaaaaggccagccgagtaggtagatgcttctctgtgcaagttgtttcccagtgttttcctgtgatttttccttaacttcacattgatggcaaggccctcggcaatgccccctggcatttttcaaagttttctgcacacagaagtcttattcctttttattaaccaactgatatattcctccctccttcccgaccccacacgcagtatgttaaacctcacctcacggagctcctggccttggcatccgcgtggacctgcacagagggtcctgccaggcggtgaatttgtactggttttcctaatgagggcattatttgctttttagcctgcccccttgtttataaaatatgccaagagaactaaacaacccgctgttcccagtccttatttacttgtccaaaccaaatgtttatgtccttgaatactaaacttgaagaaaaaggattcctcctcgtgggaaagctatgatcactgagtttttttctaaactgtcgctgcaggcctgcttttcagtcaacatgcaacttatcaatgactttaggaacaattcagacccgcttcctttgccctagactgtggagtgggggagctctaggttcctgggtctgtaactattagtatctccctgagacacctcccagcccaggtgcagcattcggagcttggcttggcccagaaccgttcattgaacataaccttgggcctaaggatgtaaaaaggagaggaagagaaaaggcatttggcagtcacagtgttgatggttttctttggtcacctgctcctgcgctggctttgggcataccccgtgctggccagcttgctggaaagctgggttggtgtgaggcaggacttctcggcctgggcagcaggttcagggtcacctggggtgcttccggaaaacaggctgctcacccccagctgactgagaacctggcacctgtgttttctggatgctgaccaggtgcgtctgatggaaccaggttccagggactgcccatgatggctgtggctgatacagtttgttcctctcaattgggatttccccatgggcatctgacttgaatcactttatttatcttctcctggcaagttttgtgctgaacacacactggccacctttccttgtttctttttccacagaggagaaacatttccttgttacctttgccagtttacttaggagaagagtgtaaattgaagccatttatcttgaaatctgctgcaggggcgcattgtttatacaagtgaaagaaattgtaacagggttatttggtctggtctgcaaggaaaaggtgtctcaagttttcctttctgccccccactttcgtcacacagtgtattagttagaattaggtttgtgtctgtgacaggcgggacagccattaatgggcttagtgagtattttttatgtttactattggtgaagttaacattgccattaataaagtgaatgttactgctcacacatcagccagtctcatgactagagttcatctattgtgtatcctatggcaggtagtcagataacagataaaacatgagtttgcagtgattttgctattctaattaaacctgtacatatttgtcagttggaggacgagtaagtcgtgaattaaattatactcgccagaagattggagaagaggctatgtttaatcctcaactcatgatacagacccctaaagaagaaggtgctaatgtcctgaccacagaagcgctcctacaacacctggactcggcactccaggccagccgtgtccatgtatacatgtacaacaggtaaggcccgccgcgtccacctactaatgagcagcaggtaaggcggtgggagaaggctgctggtttaggccccgttattttagtaaatgaagttgccctggaaatgcacctggagtattagttcaaatagctttgcaatgaaaggatttttttcatcttgatttatcgtttctcgagtttggtaacaaagcaagtgcattacttgataatgtattgccagtaagtatcttggcactgtccccaaaagaggatgacgctgagccacttggggactatacacccaggctgtaagatgtttcattgcttaagagatttttggagagtgatattttgaattgcccttgctgaacttaaaaacaatgcgaaaaagaagagctgcttcttgtgactttgtactcttagttgttttgtgtcacacagcacgttgggggctgagccaccatgggaattgttgctgacacctttttatttatttttttgagacagagcctcactctgttgcccaggctggagtgcagtgatgtaatctcggctcactgcaacctctgcctcccgggtttaagcgattctcatgcctcagcttcccaaggagctggggctagaggcgcccaccaccacacctggctaatttttgtattttcagtagagatggggtttcaccattttggccaggctagtctcgaactcctgacctcaagtgatccgcctgcctcagcctcccaaagtgctggggttacaagcgtgagccaccatgcctggcccgctgacacctttttaaaaagtcatgttttagcatcgtattgctaatttcacaatgctgtgagtagagtaaagcattaggaagagttcaaaactcggtcctttttcttatgtatctagactgttggttactacagggcaggggccacctcttgtctgttttcaccccagcattgagaacagagtgggcattcagtttgttgattgcttttgaggttggcatcactaaaccccatttccaggggacctctgagttgatgtcacccaaccccatcacctcccctaggctttcagcacctcttcactgaggcctttgttagtactgtttatttttcctggaagaggtgaggaagtagcagtataggcatattcagcagccagggagaaccaaagaagagaataaaattaagatttttcttgtcccttctctaacctctgcttacattccagctcgacaggatcctagggacaagcacagccagggtcgagtcacatgtctttggcacattcttgtttgtttatctgtaacctgggcttatggtcatgtgtgctcgtatccttcatggttcccagaacaagaccagatacatgaatgcaagggccttagaaaatgtaaaatcatgtttctgccaggcaaacttgccctgttggtctgtaacaagtattgtagggaagcaactacctggtacagttttgcagaatgtgaagtggcatccctgtggggagccaggttgtcctggggccactgcaagcatggccaatgcattcttagtgtttgtcacctacatgcttcaggagaagatgtgagggtctgtgccattaaattacactcttaagctgagatgggtccagagtaattttatgcattggaatgaactttaagaacatgtagttcaacccatcccatgttttaggtgagaaaactgggaattagactaattagagcatttgtccaagttcatgcagttatgaaatgagagagccaggtttcaaagcctttttctggcttcaagcccattcatttttctaatgcacaatgatgtccttctcaagtgtaaatgagagttgatcaagtaatataaagtgagaacctactcatgccggatagtctatgttgatgctgtatagaattaaaatataaatatgtccatggatgtgtggctaggtggaggatggcggagatatgggtaagttaggcacagctctcaaagagaggaaagacatcagtatagatagacatggacaaaggaaacgtgggcggtccccatgacagctgcgccaggtttcagcaggagatctgcccagccagggctctagagttcaggagaagggggtcattttcaacaagcttaacatgggggtgacatttcaacagggcgctgagagacaggaaggcacagggaagaggacacagtaagctccttgggtgaagacaggcctcccttaggaggccaagaatagagcagttgggagggaagtttttactgtgtttctttcttttttttttttttttttccttcccttggacttttccatccccactcttccagattttcttttttttttcgttagactgatctccctaacacacctggaaagatatgggcttatataacacttttctagagacaataaaactcccgattaattcttttttttttgagagatagggtcttgcttatctaggctggagtgcagtggagcaatcacagcttactgcagcctcgaactcctgggctcaagtgatcctccacctctgcctcccgagtagctgggactatatatgtgtggcaccacgcctggcaattttttttttcatttttttgtagagatagagtcactctctgtcacccaggctggagggcagtggcataatcacagctcactgcctcagccttccaggatcaagtaattttcttgtctgtatagctgagatgacaggcatgcaccactgcgcccagctaatttttaaagtttatttatttatttattcattcattcatttcattcattcattatagagatagggtctcactttgctgcccaggctgatttcaaactcctggcttcacgctgtcctcctgcctgcacctcccaaagtgctgggattacaggcgtgagctgcagcacccagcactaaattaattcttgatctgtatatttattcacatttctgtaagataggaatagaagagactgtgaagttagaatttgacccacctggcacatgttgttgtttataatattaatggttaagagcaggagagttcattttgaatactacctattaaggacatgatctgccagtaaaacatctccgcacctgagtatgtgtcaatactttgcaaacctaatttaatccccgcctattttgaatttatgataattcagctgggctgccctgaagttgtttaatgtatgtagaaaagcagattaatggtgtaaacaagattattgggagaacacttaagaaaacaagacttttcaagtactttggtagcattcatttacataaacaccctacatgttaattacgattgagtattatctattcattaaagcaagcttgctgggtctctacttggcaaaagctctgctcgttttgacagatgcttaaaagtgatcgaaattgcagttctttttatatgttctatcatttcgaatttgcactaattttcttattacagtgagaaatttttgtctctgcttttcattttattaggcagtggaaattggaacatttgtgttacaaatcaggagagcttatcacagaaacaggttacatggatcaggtatattttcttcttgttggcaaaaatttctcaggaacaccccagtagtgtgccttaacctaacgcatggcctcttctttttaactttgacagataatagaatatctttacccttgtttgattattacacctttggactgcttctgggaaggggcgaaattacagtctgggacagcatacctcctgtaagtgtgtgatcatgctttctgatgtctgtgacttctctaggactcagtgtttctaatgttgcttatcattgtttgttccatttcagttttgaacaagaaataaaaacattgaaattccatgtgcattttttgagtgaatagtcgggggagaggggatttcagcagaatgttttttctcttttcaaaaaacaattctgtaggcgtcattaaatttcattcacttttaccaacctatttatatgcaaataaaatgcaaattattgcagagtacgtgtgattttttaactctttaaaatgttcgtagtttcgaagacgaggcatttagacacttattttttaaggagagactttattagtgagtgggttcacatcagaatgaaatattttgagtttgagatcttcctgtgaagtaaaaagctaacctttctttagatcacactaatggcatttaagggggaaatccactatctgtgaaggccacagtagggaatgtttcaccgtttagcagttggatattatatataccgcatcatttagagaataattgttaatcagcatagacattttcagttaattatgcaagagtgagagcttgggttattgtttctgtcctggcttgcacatatctgcaaaagcaatttgcagtggccatcccctgaccttcagtgtacagttttagatgggaaataaggggttttgtgttttctggttgggagattccgaataatgacttcagcctggttaagcagctacagtgtggtttgaaccacataacaggcagccaaaagcctttctggtctgtcaacagcacagattcaaaagtgagtgtggggggaagtggctgtgatggtggtgatggcagaggctgcagggggcttgcccattccattgccaggctgtcagagagcgctcataagtatgggattgttaaaggtagcagagatcaaatattttgattgatgacatttacaaagtatttatttggctgccaagtgctaatttgatattgtgacgccctcttttttaaaaaaaaaaaaatttaattttggatctgtctttttggctaattttgtatgtagatattaaatatacaatatcagcaattaaagattattcagtgccctcattaacttatgagtcctctctctgcttagcatcttcagtcatgaattattttcctgacctaagtttttatgcagatatgctggaaaggagcatttgttttgatgccagagtcccagaactgcagcattgccaggaacctcctacaaggtggatgcagtgggcgcagccgtgttactttacgatgcgtttagaaggctcttttcatggtctcgtctcctaatttcttttgcagaggtaaacctcctttgcggtggacaaacttcgaccctttggaattcctggaagagttaaagaaaataaactatcaagtggacagctgggaggaaatgctgaataaggctgaggttggtcatggttacatggaccgcccctgcctcaatccggccgatccagactgccccgccacagcccccaacaaaaattcaaccaaagtgagtaccagcagtgagcgctctcagaagggtggagagcaaaacacttttttgtgtccattcatcgttcactttattattttcatttttaacatttcattctccatgatcgtctttgtctatggaactaagtttatttatagagctaaattttgctgtaagatttgccatacacctcccattagccttgctattaatgttctctctgaaacacacaagcccttaatgcactggattttaacaaggcatgtgacctgcctactaattcccataattatgtggctgtctttttattttagcctcttgatatggcccttgttttgaatggtggatgtcatggcttatccagaaagtatatgcactggcaggaggagttgattgtgggtggcacagtcaagaacagcactggaaaactcgtcaggtaagccagctcccgaggacaatctatgccctgtagtcttcttcctttcctcaaaagccacttccctcctgacatcggcaagtgtatttgtattaatacttaaaccgttatcctcgctagccaggtggcgtcatagaatattaagaaatagtagcagactgcaacagcttgaaaaagcaccttgtggggaatttttcaagaatggatttgtagttttcatcaggaccatagttcctgactatagggtttaaggagatctgcccattaggtagagaatgggagcaggtgtaaagtaggccgggacacactggtcagagagagttggtggtgcgagctgcacagtgtcatagactgttagcaaaagatggagagccagcggctcaataagaattatcctttgtgcacttgtggactctggtcagtcaggtgtctggcgtttcgtgtaagatttctcccttgggaacgccaccgtctgggatttctgcacagcaagtatgcgtcactgagcccggtgtatctgttcaagctatctgctcctctccccttcctgtttcatggaatggaaactgtgaaaggaaattgcctattaatttaattttggggtatatctgtaaaaggtttgtaaggttatacctttaatatggtacatcaatctattaaataaaataaccatcctggtcccattttaatggaaacatgtgctcacagagaaggaaaagaattgcagccagtgagttgggggagctggctggggatttgaggcagtggaaactgcttcctgggaatactgatgatgtgccttcccttggactgtgctgcagcgcccatgccctgcagaccatgttccagttaatgactcccaagcaaatgtacgagcacttcaaggggtacgagtatgtctcacacatcaactggaacgaggacaaagcggcagccatcctggaggcctggcagaggacatatgtggaggtaaacccaccttcgaatcggcgtgcagactcgctggttatgcaattcttcattttcaccattatttaaaacatttctttccattcgctttattttcaaaacattgcaattctgggaacttgatgggatgaaaacttttttcctcttctttgatattgaaaatcctgggataatatctaaaagactagttctaattggggtgccctgagacatgtttagtaaccagttgtgaattccagaactaaagcacataacagtgtttaaaaaaacacttggttagcaaaggtgtctggaaaacattagcaaggcatagaatctgttcacagctgcaggccccttggtcaggtcatgtgacaggagctggcctttgtttcccaagcagtgacctctactgagctgcatgtgaccttttaaaagtggccagcaaatgaacagggggaggagggccataagaatgagttgttttggattagtggggagccgatgggaccgcaagtcaattgtgaagttaacggagaagagacgagcagtctcagccctggagtaaatacagcactcagagtgaactccagcgacaccagccctcagcagcacccactgccactgattagccatggcccttgtcctaaaacagggttctttaatgttagcccaacttcagcttctctccctgccctggaatcacgtagaacttttttaaaaaatgcatcagaaaaaaagaagggctgcgctgtgtcacctgagatctgtgctgtcgaggcttgtggaagtgttcattgcatttgggcatttcgcattctgttgtgaccacaggtggttcatcagagtgtcgcacagaactccactcaaaaggtgctttccttcaccaccacgaccctggacgacatcctgaaatccttctctgacgtcagtgtcatccgcgtggccagcggctacttactcatggtaacgctcgatgccatgctcctgggggctggagtttggtttggttgttttagtctttacttttccatgactgctcctgcttcttaactgctcttaacatcgatgtgcatccaggacagagagagcgtggcttcacagtggtttaaaagtggtcgtgtaaagcatttttcccatttgccgtttgcctacctttgactcctgtcattttatgtgacgcccttgatgtaaagttttgttgttgttggataagttctgccttttgatttggggtgatgggtggagggaaacattagaatcacaacacattctaatgttcggcttttgttctgtgcccccattgttctgcttgcagctcgcctatgcctgtctaaccatgctgcgctgggactgctccaagtcccagggtgccgtggggctggctggcgtcctgctggttgcactgtcagtggctgcaggactgggcctgtgctcattgatcggaatttcctttaacgctgcaacaactcaggtactaaaggagccatttatctgctgtccgttgacaaatgccacccggcccccaggcttggcccagccagcctcctgtgtgctgtgtgtccttctcaccggaagggtcttgcagccttttccactaggatgctactggtttcaggggaatgctgtctcttgatgctgtccgccctcagggaagtgggtaggaagtctgttgggcttattggttagtagagacacttggctgataggaatgtatgtcattgaccagggttgtggctcttcagctctggtgggcatttgcatggcttgcagggcttgtgaaagctccgattgccaggccccacccccagagtttctcagtaagtctggggccggggctgagaatgtgcacttcagggcaattcccagtgatgctggtccatgggccacactctgccaatcattgcttaaatgagttggattccttctcatttactagcttaaaaaatgatagtacactgactttcgaagtagaaacgtgcaggatctcctgtgagctgaaatggctaggctttgggacgtcaagtgaattcttcaccatgaggttacggaagccctgcttcaggagctgttaggtgctggtggcagagtcctaactagctttagaatcatctgaattgcatctcgcatgtctaatgccaccatcctctgtttttgctgtaggttttgccatttctcgctcttggtgttggtgtggatgatgtttttcttctggcccacgccttcagtgaaacaggacagaataaaagaatcccttttgaggtaatgcaaaaacaaaagaagagagctttggggacatcacagcttcctctgttcctaagtatttgtcctttaattttcctcagtctgacccagtaaagatttcagtcccatgtcagatgatgtgtcactggctgccagtcaatgaaataagctggaagactctcaggacatgtatttgctatgagaagtcccaagagctgcatctcgggtgcctttaggaatacgggtgtttgttttaatgtgacactttatccctaactgccatacattcccagagcctgcatttgcttctctggagatgtctgtcacttagccatcacctccctccactcccttttaaaattatacttaagcgttaagtcattatcttgcagctttcttctctggatggtaataaccatgaagaattgatgactctgtagatggtactgaataatgctggtgttagggggtaaggcaggtggctctgtttccctaatgccagcatgataagctgtaataacagttgtgttattctgccacgtatctgctcacacagtctgtgctccaaggggaccatgtccagtgcagctctcagcgctgtgtttttttattcccaggacaggaccggggagtgcctgaagcgcacaggagccagcgtggccctcacgtccatcagcaatgtcacagccttcttcatggccgcgttaatcccaattcccgctctgcgggcgttctccctccaggtgagcttctggtgatgaaggctgtggtgatcctgaacggggcactgacttccagcatcccatgtctgcggtctctgctaaggcacttcagttacttatgaagtgaaatagaaatgcctgtgtttgaggctctgtttaactgggtggatgctgctttaagcttataaccctgacactccctctaaaaaactaagcccttctggagtttttccttcctttctagccctatgaagcccagacgtctgttgccttatagagtggccatgtcctttatgcatggctttcggggctactccatgttgccctctggggtcaccagcgctgcagccagcttctgggccatcccctgcttccaaacaccactcccagtacctgcacttaccccctctcccgctgcccacttgatcccaaacaggctaccttttctttcgcttttgccaaagcacccccaacccaagacagtattaagctgaggtcgcatgtcagacggcactgcaggaccgcgaactggcgaggctctgtggagaatttcctgcagggtccgcctcggtgggccctttctttccacctccctttcctaagttggccgccacaatctttcctgtcccctcttctctttccttttggtcccctgctcccctctcaggctgcccaagcagactcatgatccctctcaccttcccatgcagagcacgtgggcccctcgtgacttgtcctctccttccagaccaggccccgtcacccccagaggccgtcagggtattttctaatccagactcagcttctgtgaattgtaagcatggacagttccctgggatggggatagagctgtagtccgttctgcgcctggagtaaattactgacgttgcccttgagctacctgaaattcataggaatcctaaaattagttactgcagccagtaaagcagagacttcaccagtttgtgccatggtcttcctgagcgcaaagtggcctggagttttgatatctcaagatgttgtgggggttttgtgaattaatttcaaatttcaaaacctcaattgtttcccctttctttctctgtgatgatatgatgtctaattctcaagctggccaggttgttaaaggaaatgacttctgtgtcactttttcacttgttgttaggatgcccggcacactcacacagctttactctactcaccaagagttcctgcagatgcgagcaggaagagaaattgaccagtcttgcatctggtttctgtttatattttgtcaatatgtttagctctttcctagtctttccatttgtcatgtaagaggaaccaatcaatcacgtatttgaatgtcatttcgctagtaaccaagaggcctgggcaactactgatcctactgggtttgggaatggaggcatctttagtatttagtgtgaggcacagctggagaaaagattctatgccaattaccgtaaccgccagccccaaaagaaacataaaaagaaaagaaaacagggtttatttatattataaatttatatagaagtaaaaatagtgaatcaatgaataacgttcagatctgatgctcgaaccaaagcacaggacaaggaaactctctctgattgctcagtggcatgaaaggtgaaccagactcgcagtgcagctgaagttgtagaatgcctttgtgcgcaggtgtgtgtctgctcagcaccctgtggtaccccagtctcatttcacgtgcagccggtgctggtattgagaaactgttctagagtcttttagtcatgggaccctgtctgcccattctctctcctctccccttcttttctgcttgcctttttgctcactgtctttctgtatctgctcatactccttcttttcttcttttctctctcattctctcctctcctctcttagtacatactgatggctcatcgaggccgactctcctttaatgataccctgtggtgtggtggtctgaaaagctacatgaggtttccttacgaggagtagccttgtagaaaatccagtgcgctaaattctcccaaggtaagcaccttacagagacaaaaatgagtactgttggtttttgtgtttctgtttcaaagcaccacagtatcactgtagaaaattgcaactatagcttccaagagtcctcatcttactgaagaatacctcctcatgacactggttaattctctgtcaaaagaaaaaaggagtgcttcgcacggtggctcacgcctgtaatcccagcactttgggaggccgagacgggtggatcacgaggtcaggagatcgagaccatcctggccaacatggtgaaaccccgtctctactaaaaatacaaaatttgccgggcgcggtggctcacgcctgtaatcccagctactcgggaggctgaggcaggagaatcgcttgaacccgggaggcggaggttgcggtgagctgagatcgtgctattgcactccagcctgggtgacagaacaagactctgtctcaaaaaaaaaaaaaaaaaaaataggatagaaaatgcaaagaaaagagagagtgtgcaatgatttttgcagtggccatcagaaaattttccctggttctcttttaaatgtattgaccctcaaaattggccattatgtagcttctctttccattgatgaacagtatcaggtttgactctgggtgttcagttgtgtttatatttgcaagatgctacagattaaacatcaaaagggagtgacccaaggcggttctgtccaatagtaaacctgcgttaccttcagaattttccatataaaactcctccaattttgtagcctgaccaaataattagatatttttttccacaaggaaactgtcttaaacctcatcagcctttatccatctgcctaaatgccatctctacaccagaaatcactggcatcagctgtaattctttgtaattaactagggcttgctggtagcccagtagtgtttattcttcaatgaaaactcacagaacagaaccccttgttgttctgtctggtctaggagggttcaagtggaacctcctctgcatgtgtcccagccttagctgctttgaggggatggggcatttcctatgagtacaataactagaattgattcacagttgcagtatcatccccatcatcttctctggtttacttacactctcttgcctttgcgacaacccttcttgctttctgagcagcccttgctggttgttttactattttggtgtacacctggggacctggcactgagaaaatactccgccatacatgtagtaggttatgagaaagtcagtaagatgggacgctgcttggggttcttccctcatcccttcatttccgtcatggacacggagcaaggtgcccagcaggcttctctgaccgatgaggccggctggtgcccatgcctgtgcccgtggggctccctgtgtcacgaacctctgctctcctcatcctcatgaacacctgtccaaattgggatgcccagggtctcttctctacattccactcctccattctaaacatgactgattttaaaagctaaaaggattcggcccccaggatgacatctggaaaatctccgttagaatcctacctgttcttcctgccatcccctgctgtctcacggtcaggtgtcctaaccccgtccacagacgtcctctcagtaagggaccagatctcacaaaactcccggttctcagctgagctaggggcttggcatcaagtctttgtttgatctgatttactggataacctcaggcaggtgacttgaccgcacttcggggactttatcaggtaatactgtcaagagcagtgagaacctcctgtttgctatgaatcaggtatgaacgatctgatcttcatagcttctcctttctcttccccaaagtgaatttcaaaccccagcagtactgaggtgcttgagccaggtgtctcctcttgcacactctgtgtttttttcacagggagcacctgccattcccctgctcctgactgatctcttttgcttttcttttttgagacggagtctcactcttgttgcccaggctggagtgcaatggtgcgatctcggctcaccacaacttctgcctcctgggttcaagcagttctcctgcctcagcctcccgagtagctgggattacaggcatgcgccaccacgcctggctaactttgtgtttttagtagagatgggtttctccatgttggtcaggctggtctcgaactccaacctcaggtgatctgcccgcctcggcctcccacagtgctgggattacaggcatgagccactgtgcccggccctctttttcatcttataaaccctgctgaagcctctcccgggaagcctgccttgactgaccacccctccaccccactgagctgctctgcagcctgacacctgccttcatgacgccatccatcattcgagattgtcatttgtgtataggtctggctctgtgagaattgagagtaggattttgtcttatttatctttgtgtctccagcacccagcacagtactagacttttctttttaaaagatctctctctttctcaggtaaattctcttgtcacagtggtgatgagcttatttgtgtaggtctatcagacaggtcttaaatacattagagtggtaagctaacatgcttcatatttttcagttgatgaaggattttcaagatagaccaagaagaaagaggttaggtagtttttagaagaacgctcttgagagggaattaattattggaagacatctctccggaactcaggcttgctggttcaccttcagcataaactcacaattcccatccaaagccctttgtggaagttctccctggattgtgttaggtggcagttatagccaggttttctttcctcaccctaggacgtttatcagtttgagatttgtgaactaagcagttctttgagaagcctcgttttttattttctttctttctttctttcttttttttttttgagacagactctcactctgtcacccaggctggagtgcagtggtgcaatcttggctcactgcaacctccatctcccaggttcaagcaattctcctgcctcagcctcccaagtagctgggactacaggcatgtgccaccacactcaactaattttttgtgtgtttttagtagagacggggtttcaccgtgttagccaggatagtcttgatcaggagatccctgaccccgtgatccacccacctcagcctcgcaaagtgctgggattataggcgtgagccaccgcgcctggcctcgttttttattttcaaagccatgtctggcaatttcctggctcctcagcattgccagtgcttttctctgtggtgccccttctgccgtgcccttccgagctgggtcgacttccaccggcttctgttggcttcccctattaacagcccaattttgtaatttttactaggtcagcagaagatttgccaacgcactgcagaatttagccctgtgtttattctaggttatggagtgacttttgaatctgtacttatttattctgcgtactataatcacacacaggaatttctttctgcttaactctccttgaccttttatgtttcttgctctcacaccccacaggctactccagaggcaatttggaatgtgcctattaaaacctcaggggacacgtgtgaaattgtatttcacgttttaaagggggacattttgatatactcgatccactttatataaaaatgtttaactgtaaaatcagggtcgcgtgacctcttggaagcattctggaagggaactgcttctgtttgttttaaattctatctcgagtgtgctctctgttctgcctttgtggatttggtttggttaggttactagcaacacgttagtagtttagttcccaggtttgtgccttatcggtttatggaattattagagatagaaaggcccagaaacagtcaagactattcctatcaaataggctcttgatgatgtagcaaaagaaactcttaacatctgtcacggtttcaaatgcttcaagaggaaagggaaagaaaaatattgtttaaaagcatctttattttcgaagcagtcctctgattgggcggaggcatgttggtgacctctgaattttttttctgctcccaggcagcggtagtagtggtgttcaattttgccatggttctgctcatttttcctgcaattctcagcatggatttatatcgacgcgaggacaggagactggatattttctgctgttttacaaggtacattttcagactgctgtggccttttgattgggtgcagaatggtgctgtgagagaactctttcagcctgtggacttataaaggaatgtgggtaacggggtttgtgctggtgtggagaacgtaggggagagattggacagaggctgcttccctagggggacatcagagtccctgggcttccttctcccctgccgcagctgaacagtctcacagccctcaagatgctggttccgatgacccctttttccatcatgaactgatgttgccgattgtaggaatgtttcatatctctgcattagagcagaacaagattgaaaaacacccatctagaaaatatatagtcctttgatggtggtttggttttgtttggaattgtgctttgaaggattcatcatcatggaacttgcttttgaaagccaaatttaggatcagtcctccatgtggcctcctcagactgacttttatctagttcaccaggcgatgaaccaggtgatgttatcaaccaggcgatgtttctggaattcagcaatgtgatgtttctctcctaagtcagagctgtgtaaaatgggtattctccgtacacagtgaaaaatggcagaatgaaagcaccatttccctgtttcagcataacattgcaacatgtttcccctcctttcagcccctgcgtcagcagagtgattcaggttgaacctcaggcctacaccgacacacacgacaatacccgctacagccccccacctccctacagcagccacagctttgcccatgaaacgcagattaccatgcagtccactgtccagctccgcacggagtacgacccccacacgcacgtgtactacaccaccgctgagccgcgctccgagatctctgtgcagcccgtcaccgtgacacaggacaccctcagctgccagagcccagagagcaccagctccacaagggacctgctctcccagttctccgactccagcctccactgcctcgagcccccctgtacgaagtggacactctcatcttttgctgagaagcactatgctcctttcctcttgaaaccaaaagccaaggtaatctgccacaacttaaggctcttcctgtcttcaaaaaaataacagaacctttggagttcatcagattgcttctacttttcttctttttccttaaaaaaaaaaaaatttcgtttaagtatgatacatttcagtcctccaaaagtcaatgcttttagagcatagggccattttaatgaggtcatcttccatgggagtgaacctctatgcagcaagtctttttatgaatgaggttgtttaaaaatgtgattattgccacttgcggtggctcatgcctgttaacccagcgctttgggaggctgaggtaggaggattgtttgagccaggagttcgagaacagcctaggcaacaaaggccaaccctgtctctacaaaatattttaaaaattagccagggacaggtgtggtggctcacgcctgtaatcccagcactctgggaggccaaggccagcggattgcttgaacccaggagttcgagaacagcccaggcaacatgatgaaactccatctctacaaaaaattgcctgggcatggtgatgtgcctatagtcccagctgcttaggaggctgaggtgggagggtcactgagcccagggagtcgaggctacagtgagccgtgatggtgccacttcattcaagcctgggtgacagagtaagaccctgtctcaaaagagagggggaaaaaaggcatggtgctgtgtacctgtagtcctagctacttgggcagctgagacaggaggatcatttgagcccaggagttggaggcaacagtgagccctgatcatgccactgcactccatcctgggagacagagtgagatcccaactcagatacataacaaaacaaggctgggcatggtggctcacgcctgtaatcccagcacttggggaggccgaggtgggtggatcacctgaggtcaggagttcaagaccagcctggccaacatggtgaaaccctgtctctactaaaaatacaaaaaaaaatagccaggcgtggtggtgcacacctgtaatcccagctacttgggaggctgaggcacgagaattgcttgaacctgggaggtggaggttacagtgagccgagatggcaccactgcactccagccttggcaacacaagactgtctcaaaaaattatatataaaacaaaacaaaataaaaatgcgattactatgattttatcctttttcctatgggagaacaacccctacaagataaatcagtttaagtgtggtggtgaaaacaaggtattaactagacagcttctctttgtccaggaagagtcagtggtgctccctggggtctgaccttgtgcctcttctgttccaggtagtggtgatcttcctttttctgggcttgctgggggtcagcctttatggcaccacccgagtgagagacgggctggaccttacggacattgtacctcgggaaaccagagaatatgactttattgctgcacaattcaaatacttttctttctacaacatgtatatagtcacccagaaagcagactacccgaatatccagcacttactttacgacctacacaggagtttcagtaacgtgaagtatgtcatgttggaagaaaacaaacagcttcccaaaatgtggctgcactacttcagagactggcttcagggtaagacggcgtgggaggctctcgtcctttcggtcttttgcgtgttcagcttcaacaggttcctttgtcatgattatgagagcgttagattagaatgtaacactgacgtgtttcatggacttttaagagttgctcaagattcttacatgaactgtttctgcagcagcctcccagatctggcttttacctataaaatgatgcagataattcagatgagcttctgtgagaatgtacaagtgcacgtcaggaaaaggggagcatgttgtaacaggtggagccgaggcttctggtgctctttcctcttggatagacggtggctagtttggtgaccacataaaatcaaagtgcggctgggatttccagactgattgccaaattatagcttactgcaccaggagatgctagataagcagtggacatagtcttacactccatattttgaccatctctttaaaaattatctatttctaattgactttgtttttagagcagttttaggttcccaggaaaattgagcagaaggtgctgagatggcccatatcccccttcctcacccacacacagccccctcgactgtaaacatcccgcaccagagggatgcatttgttacagctgatgaacctgcacattattacccaggctccatagtttacggttgggttcattttgaccattttttgatttggtacttgaagtaaagttataaatgcttagtaacatttcacattattttataaataattaaattctgttttaaaatgcctttcttggtggggcacagtggctcacgcctgtaatcccagcactttgggatgccaaggcgggcagatcacctgaggtcaggagttcgagaccagcctggcctactagtgaaaccagctctctactaaaaatacaaaaattagctgggcgtgctggtgggtgcctgtaattccagctactcaggaaactgaggcaggagaatcgcttgaacctgggaggtggaggttgcggtgagcctagattgtgccattgcattccagcctgggcgacaagagcgagactccatctccaaaaataataaataaataacagtgcctttattggcttcttcactcttagaaatgtttctaggaaatattcatcagctggaggggaaaaaaaagtctaaattttctcctgaccgactgcacgtaaatgtatgcagtgattccaggaacatctgttcatttattctgcattgacacatgcaaagccaagtagagaatcaggataattatccacccaattcaagcaaaacacttttactggagtaccaaatcattatggcccccaacattttttggcttggattatccaaatgattgtcttaatttcccacttaattaggcttgtttaaacacagatgtaagtgccttttttggtctgaagtcaatacacttgtatgtaaagactcagcagccagtttccctgagagtttgcaggaaatggtcaacaacttgaggttggtagaggatggttccatacagcttctggccttgacttgtgtttaccagaactttgtgtctacatgtacacccaatttgactttccttttggaggaaggtacagagaacatgccatgattattatttattaacaccctcctgagacgaacgtgaatttgttccaagttttatttttcacatttagtttagaaagcaatggtttttgggataatgagttaaaagagagacagtggagagagtccctgctttcattttccccccattgaccaaagacatataaataacttgccacaaatgacaaagagatctgctgtgccctgccagtctgtgagcagagaagggttattgtagagtgtatttcagtgtctttggccattgctctggaggctcaatgtggcatgttaggcagggattgggaagggggtaaagggggattgtctcgaggcagtgcaaagggttaacctttttatagagcattgtagatcatctctatacgtttcttcctttatagatgtaaatcagctggagttgagtttttttttttaaggtgcatttgaatcatgttttgattgctgtgtgaacagcatacacctagaccaagtgagatccattggtgctaagcaatcagggtcccaggcagccctgggactccatgactgactcttacagggtccgctagagcactcaacacagaatgaccagacactggagccctttgctgcctacacgtttttcaggcctgttgaatggttgatgtggtgtttgaacattttctacaaggaaacaattatccttgagtcagctttccttgctgacatttttgtgtggcttttaaatggtgggagcctcattggtttttaatggaattcccattaaaactatgtcatctcattggtctttatcgacattacaatagtttgtctttgattttttttactcctaaaactatataatggttaatttcaaaactatcccacatgtcacatcttaaaacatacatgcaaataaggcagagtcagataaaaaccatgcctcgagtcatgtacaaatgtgttcatttttatttcacactggattatgcaaacaaaattttgattaacattttacttctagggtcccatagctgaaggaaaatgggcaattggggttattcctttggcctagaactttacattagaaaataattattgacacaaaatattcataagaggagaacttctagctaagatattaaggtttgctgtaaaataagtaaaaagtcacaattttctagagtgtgcatgcattggaatatgaagcactggctaaagggcagtggaaacccaaccttatcccttgttttgtatccagggtcgtaccttgtacatgtgcttaggccagccccttgttacttgagctttttggtgattagtcagaaaatactgtagtaatggggaaagaacttaactgttccagaaagtcgatgactgtttcgtattcatctttgaacccccagtagagtgaatggcacctaagtgaccagcagtgtggattctgagttgaatcgagtttccagcaaggctgacctccccagataggatctttcttcctttgtttcaccctcgggtgtcccagaagtctttgtgtgtgaatatcataaaaccgcccccagattttggggaccccgtttgccaccagatgttattgatgctggagttgaacctgcttgtcttactcctgcctttgacacatccttgggtaccacggtgtgtccccgcactgtaggccagtgagtggctccagctgcctctggtgacttgctgcctgggtttgagctccatccaacactcacctgctgggtggccccctccagtctcccctttccaagactcagttcctccatctgtgaagccggagtgattaactctaacggggctgtcccttggttgccgtgggatgcccagcgccaccccacactcaccaagtgtgagcctctcttcaggattagctggttaagggagaggggcttaaagcccaggacacgtcatgacatcatgaaaattgttacagcgaggaaaacagacgaggcctccctttttgaggggaaaggaggcgcagtaatttttcttctgctgtttattgtttttcaaaaacagaaagaaagggctttcagtaataaaataacatctgctcagtaccctgtgtgtgcatgcctccctatgaaaacccgtctgtctgagaggtgcacggcccacccggtggtctcctgtcccgtctcccctccacgctcaccctgacacagactcctttcaccaccgagcccactgtcatccccaaattgttcctctagccagtagtgtcagaaggagggtttcgcttcttagagagacagaagggggcctgtgctccccctccctccccacacttcagaccccaagagcttaaccattctgagcactaacgcaaccagattttttttgaagcctttgaaatcatccaaggcatgtcccgaaatgaaataaacgcttctcccttcttactagccgtgtccaacccatacatgtacagcttgttcaaaagctgtggtttcctgagctgctggggcttgggagctctacttgggaggtggctgggaggggcaagggtgggtggggggaggggggtgtcccggagagcgtgcgcaccagccagcgctcagaccctaaggccgggtcaccggggccctgttttctcttccaacatgcttatctctttacagctgcagccaaaccgtcaggtctgtaatgatggttttgattactgaggccaagcgcagctgtgtgtggtgtgctggcgggctcgcccatcccccaggcccagaaagctctttcctccccctccccggcttgtggtttgtcatctgttctcacagagcctccttgtattggcctgtggcttcctgttctcaatcggatccaaatttaccctgtgaggtatttccctgcgtgcacacgagcgccttcccttccttctcctccaccccctctcctgaggaagggtggcagagaggaagagagcagtcgagagtgaataggtgttggctgtgatctttacacaacctggcagcggatcccacagcttgtgttagctccacaagtcgaacagatggaacaaattgacagaatcgtgttcgctcaccctgggctccagaagcagctgagctgctgtttgaagttgggggagtttgaatgtgctttttcccctctgtgtggaatttctggttgtattgaagaactcatgacttagcaccccgagtggcacgaaacggttaatgaccctggtgcgtgtctttccgtcgcactcttgccttcttttgtaattgtcatggggcgaaaggaggagagtggtttttcttaagataaaatatgagtatttgtttcatagaaacagataatctccttccccccttttgagcagtggctggcagcagctgcagttcattcatgaaagatccagtgctttcagtcaaagtggatgtgggacacagagggtgtgtttctgatggacgtctaagagccccctgccctgctcagtctcctcagcccaccccgctaggaccagggtccttctggctgcgagttataatgtgttacaatcatttgccatttctaggacttcaggatgcatttgacagtgactgggaaaccgggaaaatcatgccaaacaattacaagaatggatcagacgatggagtccttgcctacaaactcctggtgcaaaccggcagccgcgataagcccatcgacatcagccaggtactccagctgctgggcactgagggcgcttccagggctgcggggccgctgccctggtggaggctgcttgacagcgtgtgaccccaccctgtgctctctggagacctaaggcactgggagctggtagaaagaatattgggtgactctaattcacctcctcccaccagctaattgtgtgacctcaggccagccagtgcacctcactttcctcatctgtcaaatgggacaggcgtgttcctaccaccagaacaattgtcagaataaagtgcagccaagagagtgcaggctctttccaatgttagaaatgcagcggcgtgtgattctttcagttctaggactcggtaccttgttggtcttgatggtattcaagcttggaaagatggatttcttgggtagcagtcatttggatgagcagaatttggggtaggtgggtgggttaggagattggagaggtgacagaaggatgggaagatttgttacatttgagatctttgggtggccctggccccaggagtagacagatcgctctgtgatgagtgaagcaaacggaaatgtgcacccttggaatcagagtggctgcgccattctgctcactcctgcagtaataaccgtttctgtttgggaatcatattctccacttgtgtttgcatcttcttgctgccatttggattccagcataccccttttggttctgcaggtgtgttcaggagtgtgttttggactcctccaattgcacggggcccgggctacctcagcttcctcggagcctcttcccttggctctttgtagcttgcttgcttcaccttcaggcagaaaaccgtcatgctaatgatcttctcagcagctatgtttattgtctccccttttttgctggcattcaaggtgacagatttacaaagtacattgttcagagttgttatggagtgtgaaactctgagctcacagcagcaggcagcagaccatcacgtttcccaaggatgcaggcagaggagtctgcctcagagacaccaggaaagtgcccaggcagcagggctgggcgagggaccagggatactgtgggacaaatgggattgggccagacccccagataccatttcctcctcccgggagggagaaaggcgtgctgcatgcacagaggccacgggctgcgctgtttgattccagggatgtgttgaggacatgcagttgttacatatcctgtggattaattgaatccagatccccgaaatccagttctctcactctctccctgctccttcttccttcactccttctctaggagccgctgtcactggtgtttttcattttgtttaaaaaagacccaaagcgaggaatgaggcctgaatctaaaataaacaggaaacggaatttttctatgtatataaaacgtacaaacacatactgagtcccacagagttccccacctcagcaaagcccacaagccctcctgccgagggagcacatttggccacgcagaggacgcggcgtgcggagtactacgacctccgggaataagatcacctggcgaggcttgagggtgtgcactcgtcccttgcactttctggcgctgggcattttttgaatccacaggtcataggaggctagtgttagcaaaatttatacagatgttgttttatttttatagctctcctccatttactgggtggcatttccttcagtgttaacaacagaggttaactgcacacagacgtgcatggggattcttgccaggtttctcccccttcccctcctataaatatgtttctccagattgttcattctctgccttggctgcagacggtcttttagcattcagatttaattggttcagccaattcctgggccatctgcagaactgtgtttgttataaacacgccagtgattgcatcctccgataagtgcacattgaaagaaatcaaaggtgttctgatgggattttcgacactttcaacagtaggcattctattctttgttgtaatgctgtgcgaagctcagcttctgtgctctcaaggcagaagtgtgtttacccccaaccccattctcaaaggcctctgttcttcccgtttttgtagttgactaaacagcgtctggtggatgcagatggcatcattaatcccagcgctttctacatctacctgacggcttgggtcagcaacgaccccgtcgcgtatgctgcctcccaggccaacatccggccacaccgaccagaatgggtccacgacaaagccgactacatgcctgaaacaaggctgagaagtaagtagcgttttatcgggaggtctgggaacttacagaggtgccttccctggttctccaaactcagcaacagccttcatccgttgacgctacccagggttcagaagtgtaaacagaacaatctatttcttctcgtttaaaactctgggagacgaggatgtgtaatgggatacaacccccgcactctatcacattgggaaatcagtgtctcgtctccattcgtagctttaatgctaagacgttcattaggcgttgctctcacgtgccagctgttccctgtgaacaccggggacgcctccaggttaagtgttattttactattgcagagttttatcgctggggattatatgtttatcttaactttgtcaactctggtgttgaagggatttttggcacattgggtcattcctataagccaccaagcacctgcactgtgtcaaagctgtttaaaccggagcagaaaagtctgtatacaacagcgtcctcttcctttcacctctcagcccagagtttgaaaggtggttctgtgtggatttcatttgcatttctggtggagatattagtagcgtatgctttggataccgggccaagggaggatgtgagaaagaagacgggtccccttgcaaacatggctggagactcagcgagtagtgcttccccggatccagtgctgcccagagccctgtggcaggcagccaaggcttgtcttaatgaaaatttatagttgagattataatagggcaaatcatgtttagcaagtcaactgaatgaccccagagggtctggaacacacaacggcagtaactaaatgcttgttgtgtaaggatttcttcccctgttgctgaagacttagcattgcattagaaaagaagcatacaaggttgaagtttgttcaggcactaaaaggataagttaagcatttttctcaggaaagcatgactcttgagttcttttgctcttgcaagtgattgaataaaactgtgtgaacttggtattttcatatgtgtcaagggaacaaaaaaatgttcccaaaatgtaagcctggagtttttagacccctcacaaagaatgactgctggaagattaaaatcaaatcttaaaaaatacacacatcacagagttaaacatttttaaaccaaatgggaagatcgtaaaggcctggaggctatgatcagcattgtttgttctttgtatcatgtagaagagcagtcagtaagctttcatgcaaagttcttctctctttccattgaaactgtgatgctcttctaccctgggctgctcctaacctgtgcccttctctgtccagtcccggcagcagagcccatcgagtatgcccagttccctttctacctcaacggcttgcgggacacctcagactttgtggaggcaattgaaaaagtaaggaccatctgcagcaactatacgagcctggggctgtccagttaccccaacggctaccccttcctcttctgggagcagtacatcggcctccgccactggctgctgctgttcatcagcgtggtgttggcctgcacattcctcgtgtgcgctgtcttccttctgaacccctggacggccgggatcattgtgagtgtattataaggggctttgtggaagtcaaattcctttcagcatagctctttctgcagccgggaagttttgtttatgtctgggcctctggaggagggtatagcttgcatcatccgtaatatgtttattctactcgaggtggtgaggtccatggttaaggtagaacctctaatggccttattcgtaggtcctctctcctgtagcttgaagatttttgtggaaagataggggactttttaaagcacaccttccatcacagctctgaacatttattaaatcaaaacactcaaagcctagctcattttttctttaattgaaaagtgtcattttgtgacctcatccaggcctaataacgacatagcaggttcttctgcatttaacatgaagggacaatcagagaagttaggagagtgatatatggagaaaatgattttgtgtgttttaagtcctgggggaaaatgataaactaatattacgaacctgttttttggcatcccttctccaaaatactctcagattttgatgtaagtttcatgtagagtctaataaaaccgtggcaatgtttaaattctgtgaactatggtatagcctttaaaatgccaaaattataaaaacaaaggccagattttgtgtctgcaccgtgagtctgtgcagcaggtacattaaaaggtaaatgtttagtctgtgagagttttcatggcacttagcaattgatgttgtccatctttcatcattccttcccctccctccacctctgcccaccacccacccccagagaagaaagatcatttttctccttctcttccatctggtaacttgttgtttatttgtatcttctccgctttggaccaagaaactccaaatctaactcacagattttatttccatttccccacaaatttttacaaggaagatgaaaggcaagaagcttttccttggattttaacagttggctcagtccaccccagctgtccccagctcttcaaagtgcagggctcctgtaacctgacagcgtcagctgatgacgacctccccgcttacctggcccccacatcatctttgcttagcctgcaggttcactcacaaaagcaaaactactttgacctgcaaatcttttattcaccccgtcctatcagctttctttagaatggagagtgaggcaaccaaaaacttaatgatgggttcacggatggtctctggcggctgagacccaagcaggaggagagatgggtcttgttgtaaactgtgaaattcgcagctaagtgatgcggccatgcttgtgcaattcctcgtggattgcgctggtggagttgttctgtatgttttttgctttctggagaaggtacattggaaaataatttgcattagaacactctactttgccttctacagctttacacatcagctgtcccacagtctcccttcccagcgggaagatgaattaggcagtaaaggcagtgtccagagttaaagcaagtcagtccattcattgttttgatctgaaccgaggacaccttagccctctggcgacctcccttgtgggcagccccagagggtgacctgcccgcccactgaccactgtgtgccctgctccaggtgatggtcctggcgctgatgacggtcgagctgttcggcatgatgggcctcatcggaatcaagctcagtgccgtgcccgtggtcatcctgatcgcttctgttggcataggagtggagttcaccgttcacgttgctttggtatgggagacatttgaagcaaaaactttgtgaaaaaacaacccatttcctctggctctgtttgtctccaagtgggaaccttgcattctccctgtgcgtggcagtgaaaaggcctcagggcacaggggccccctaggagagcctgcaagatttctggattcctttccctcaagggaggctaaggagaggggtatggaaggtacatggcagcgggccctgtcagccgtaggcagtgcagggttggtgtgttggagtgggccttgaagggccgtgctcacctgactttgactgtcattatacccccacgattcctgacgttgtgacgtttgttcataaggcggattatgtggtgagtgtgtgggtgggcatacacagagttttaaaaacaacaggaacagtggggataaaatgagaccacactcacaggcttggggatggcatcactgaggatgaggtgagctggcagccaaggaagtaccctcgggcttaggagtggaggctccattgttcagccccggggaactggctcttctacctaagcccacccagttcctcagacctcccagcctctacattcatgatagcagaaagtaagagaaccagtgttgctttcaacagacatttttttccctctctttttctctatcttgccctgtgaatgctttgttggaggtaattaaacttcagaaggaatctttagtccaagagataaatctgttgtatacatttatcaaagaattatccaaaacatcacaactgtgtaaattatgttctgtctgcagattagagcctaagaacttggggttatcagtaggcattcaataagtaaatgcgttcacctgttaaatatcgacgtgcgaaataccctagctaggaagccagcactgggcttgaccaaatcacttccgccattgcttttgcaatctctagcacaggtttcctttgggctcagcacatggcacatgcatgtctccacataggctgcagccttgtgccttctgcagtctttccagggctactgtgatacaattgagagattgtaaacttttgtgttttggaaggaatgctttgttgaagttatcccattttttttacagtgtatcataaaaagccaataatatggcaacagtattctctaaattttgagcctgctcaaattattttcttcctttgagctgggaggagggactatttttttaaaaagaagagtgccagcctagagtttagaaaacccataattccaatacagttcttcaaaagggagataaatttgcatgtgagttaagaatccataagttattttattctgatgcaaatggaaaccaccttttttggaagctagcagggcaaatgggtatcccagagcagatttttaccatggaaatgctaactgcagtctctaaactctaggacttctagtccaagtcattttcagtattctgatcctctatgtgaaattgcatttagagttggcagttattgctctttcaaggtttgtaaaatggtagaataaggctgtgaagaagagtcttctttcatgaatgtctttaggaaatcagtgggttcccgttcatttgctgtctcagtaacatagaaacagtgtgtgacagggtagtcacaactaggcccttatggcctcatggcccaaatatgatgcaagccagcatggctgaaaaacccctttggtgccttgccccaagagcagaaggcagctatattgaccctaatgtctttaccaactctgaaagagtagaacctgtttgagagaaaagtatgaaaactcttagcacacctttgtatatttgtattttttcatctgttaaggagaacgaccgtctcagtccttctgcaggtaggtaagggatagaaacgcatcctgccaaagacacccagccctctcctctcggcataatccagagcagcctgaacttcagagagagaacttgtgccaggttcaacactccctgcaggggtcacacgttcaggccaacagtctgatcttccagaatttactctgcaaagttcccgtttagttatcaacagcatttctggcctaggagagctttaggactgcaggagagacagggatgtgtccacacaatgttcagaagggcttgattcaaatgtacggtcctgtgtatttcttgcaatacactcatagtgcttagatgtactacaaacatagcctgaaacagtgacagaaggtctcacctctgcataatcgtgaggaagtgtgtgtagcacccaattgcttgggacactgagctaagctcttagccatccaatgcattagccagaatcctgtgctgtgggaattggaggtctcacgtgtgagtggtgtgagatcatttaaggaggggggaaacttcggggtgagtatcagtgaaaagaaggggacatttctgtccatttttatatagttttgattttactgtgttcaagatttacgtcaacaccaaatatgacccagtgtcatgaagaggtcatcttagtttaagtctaggtgctgctagttgagctactctgattacacattctagcaactaaaacagtaagatgtgagcagttctgagagcttgtaacatttaggacagagctgagcatttaccaggtgaagtccagcaacctgatcttgtgaacatcctcattgcacaggcctttctgacggccatcggcgacaagaaccgcagggctgtgcttgccctggagcacatgtttgcacccgtcctggatggcgccgtgtccactctgctgggagtgctgatgctggcgggatctgagttcgacttcattgtcaggtaagcaggcgtgtgcaaggagacatgttttagaaatcattgtgattgggccgggtgcagtggctcacgcctgtaatcccagcactttaggaggccgaggcgggtggatcagaaggtcaaggagttcaagaccagcctggccaagatggtgaaactcatctccactcaaaatacaaaaattagccgggcgtggtggtgggtgcctgtaatcccagctacttgggaggctgaggcagagaattgctcgaacccgggaggcggaggttgcagtgagctgagattgcgccactacactccagcctgggtgacagagcgagattctgtctcaaaaaaaaaaatattgttattagctcaggtgatcttcgttgcttatttccttctgtatctggtagattgcagcacctcgtcatcgtgactctgctttcttttgaacttgttaacgtagagatattcggaggtataaagacaagctctcttctagagctgtcttggggagtatcttgaaaacagaaggtaaaggatttggggctggcagcaaagacaactctgcagcttgaagccaaaggatcacccaataggtggcccattattgtctcgggttagaaacactgcagaaagaaatgccacatttgacctacgctccctctccttcaaactgtagaaaggaaaacttaaaaatacctaaaattgtcacctgactttattcttttaagaagtgaaaatgacgtgctcagatttcatattcgagtccccacaattaggaagcatttagcattggactttggtgtcaactcttgggaatctaagcctagtttggatctcaaggcaagtcgtttccagttgatttaattaagaatatgactttgtgaaatataaaagaacagtgagttttccttttgaaaagaatttgagaactgcagaggaggaaaccacttgcttctttgagcagcctccatggctttgtgagggacctgctcttggatagaactctgctactttatggagctctaaggccagaatcaccaataagtaaaagatagtccaggattagaaccatgacagggcagaaccagatgtgagaaatgattggtttgtttggcacgcttcagtactgagaggttgtgtgtgtgtgtgtgtgtgtgtgtgtgtcagagagagagatacgcttcttatcttcaagtaaaaagaagagggtttcaactagaagttttagccaaagttttattacgggaaagagatgagtccattggttggcctgtggcatagcccactgggcaatttggcatcatggaggccgccttcttagaatgagtgccaagcttgcttattgtagtttttgcatagagtgaatggtgaagtggaatcgctgtagaccagcgcttctcacaccgatgtgctgaggaatcatctgagggtctaagtgcagggccgatttcggggggcgggaggtgggatgagggctgggtctgcatctccagctacctccctgcaatgtccatggagctagacttctcagcacaaactactgctaagccagcaagccagttcctaaattcctgtttgccaataccaagtagagagttgcccaactgagttaaatgttttggtctgtgttttattttagttcttagtttgattttagcttttcctttgttcttagtatacactttttcaggcactaacgttatcattatgatataaaagctcaatgtcaagtagagtttcttttgcatatttactttctcgtttaacacaaatataacaagcaccccataagtgccatttgcacaacagcaaataatggggacccccatatccctctgtgtagcctaaggtcttttaggggagagacaagttcacaggcaaaaccaggggaaatgcaaggtgtgctggggtctcatgagttacaggagggtctcgctcagccttgtgggggatgctgaatgaggaaacttagcctgaattagagcccccagctggaaacctggcagctggaatcccagcgctctcctctcagccggggttgttcccgcccagaaatatcagggttcctctttcaagcacttaaaagggcttcccattttctaggatgggatggattaacctgataaaggcctcaccaaggtcaaataaatgagcagacactgtatatgctaagccgtcagaaatctaattggcctgtttatgcttcagctagatggatgggatgcaaatgtcttaatgtggctgctgatacatgccccagccgaaagttccagcagtttacattagaccaagacattggctgcttggtttttactaatgtagttcagaagtttctagtgtttacaatagctgtgaggtatttgtatttttatggggattctctctcctttcatctgatgtcaaaacatatatagacatggcagcactggttgcctgttccattttatgaaccagaggaccattaacagatagatatcttgccccccccttcccagaacatcctgagcctctcccctaccccagcccacttccatcagagttgccctagaaatcattagttccagaaacgcatccctgcgtggagtctgtgccctccagccatgcagagtgtctgccagaggctgtccctggctgacaggtttaccttggtattcatgaaggattccagaccttagccctcaatggtgggaaagcagaactacttctgcactctcctcctctgccatggtgctgcggcctttatgtttgaattggctgacgcaaaacaagagtattcagagatgctaaattgttcaacaaaagattggcccgcagagcagccccgccattgtggagtgccctcacccagcacaatgccccagctcccacagaatgggcagcattttctttgcagaaagctggttcctgtgttctaaaaaggttgcaattggagctatttggtaaaactggaactcacagaattctaggcagaaagttgtgattaatgaaaggccagggaaagccttacctgatatgctagagacttaattagagattctgccgtaagatgcagaagcatttcacagtggattagcagcctgcagaagtgggctgcttttcctcctgggctaaattgtttaaattctacacccttcacttcatttgtttgcttctgctgggttttcacgagcggggcccctcggcattgtgtttgtgctttcagtctgcccagccattcaggtcgcattccatatttttgtgtttgtgtaacacattcataaataacattacatgccatcagagttcagcaaattaacaaactaattttttttttcttcccttcatgaactaacactttgggttgtggaatgtagtcctcaaagtcataaggtaaagaaacaaaaagcaaaaactcaccttgtgttgaatgtgaactgcggttggataacagccttttcagtggggtgggttttgttcatttctggcgttgccatgctgctgtgtcgggcacacggagggtggcgcgatccaccctgtcacagcgcgtgttcccgtttcctcttgatctcccaggtatttctttgctgtgctggcgatcctcaccatcctcggcgttctcaatgggctggttttgcttcccgtgcttttgtctttctttggaccatatcctgaggtcagtagtgacacggggatgtcccacgtgtaggccggctgaatgctgtgtttcctgtgccgctcttcacttcgatacttaggtgcctccccacttgctggtggttcttcagtaaacatctcagagtcatgtctgttttcctcttcggtgtactggctttgagggctagagggcgggttcggtttggttcctctaaatcaactgattggcagcctgggtcttacagatctttatacagtaaatgaagactttccccttgagatgcataattggacttcacaagagtaaaaagtacacatcctgcctttccagtgtggagcagaggacagttcttctgctccagctgcgggacctgaaggtcctccaggtggtagagaaggggaggttaatacggcacagtgcgcagggccccagggcagggaacagaggcccctgaaaaataccgtgctttgagctttgagtgtggccagcaggtaaatggacaagaacacttttaacatggaatccccttaaataggtgtctccagccaacggcttgaaccgcctgcccacaccctcccctgagccaccccccagcgtggtccgcttcgccatgccgcccggccacacgcacagcgggtctgattcctccgactcggagtatagttcccagacgacagtgtcaggcctcagcgaggagcttcggcactacgaggcccagcagggcgcgggaggccctgcccaccaagtgatcgtggaagccacagaaaaccccgtcttcgcccactccactgtaagtgactctgcagaaccagggggaggggtcttcccaccgtggtagtgggcctggaggtccagcgggggctcctgtctgctgagcagcacatcacacaggcagatgggatgcagagataaggtacagactaggtcaaatcataggaaataaccagtatttaactctttctcaactatacaaatgccatcttcctgtggtttgatctcataaaggataaaaagggcaggggccagtaatgtcactgcacaaagcagtagcatctatcttgttcagggtgaggacagtttgggcttcaaaggccagagataaagcattcctgccttttttttttttttcctcttaaggtgcatgtcatttgagagtgatattttctaaaactagtagtatttttattgccaacagaggtcaggttttttccttctctcatttctgttaggtttcaatgcccttgatacaacattcattattattgtctaaatactttaccatagcttttggggctccaagctcatgttccaggtggcaggaaagagcagagaggccaagaaccacccctgagttcttagccttcagtgattcaggaggtcaccaggagcctgggagcccctcctcggaggctccaaggacctgggtcctttcctccaccctgtgctccctgggatgggctcagccctgaaaactcaaggaaggttctgggctgatgttgctccactgagggccccctgctgtccctccaggaaatgggtattccagtcccaggccagagcagcccttccgtgaaagagagaaaggccaaccaaataacctgaattgtcctcctcctaccccccgcgacgacgcccgctgagctgcagtgtgaatctggttttgttcagcaggagcctaaaaataggtacaagctgaacgactttgaagttggtcacggtccttttgattgatgtggccactgtgttgctctgtgctttgtatagagacgcagagaccagattcttaacaatcagatggaacaggctgcccgccacagccctccgcagtgacgaaaatgccctctctgctttccaggatgggagccaccggccacacgtggctgtggagcacttgaaatgtggccggggctaccgaggagctggattttggattttagttcattaaaacttaagcaaccacatgtctggagcggctactgtgtttgacagagtaggcagagacagtcctgccagcgtcctgcactcaggccagccagggccgcacacttagcaacttcgggagaggggcagctcagagcctgcagaacctaacagggtcgggggcaggttgtggggggcagcagcttggatgctctgaccacagcccacatttatgggcagcagcagtacgtgtccagccagccgtgtcagagaaagcctggaaacaggattttcaaacaacacgctcctccgccaggtcctggaggttattagaaggacaggcttttcttttgtgggtggaaggcccccattggctccccagggttgactgagtctttggtgaaacccaaggagggaagtgtgggagctgcggggaccatgcccagcctgggataccacccttctaacccaccctcaccctctgcaggtggtccatcccgaatccaggcatcacccaccctcgaacccgagacagcagccccacctggactcagggtccctgcctcccggacggcaaggccagcagccccgcagggacccccccagagaaggcttgtggccacccccctacagaccgcgcagagacgcttttgaaatttctactgaagggcattctggccctagcaatagggcccgctggggccctcgcggggcccgttctcacaaccctcggaacccagcgtccactgccatgggcagctccgtgcccggctactgccagcccatcaccactgtgacggcttctgcctccgtgactgtcgccgtgcacccgccgcctgtccctgggcctgggcggaacccccgagggggactctgcccaggctaccctgagactgaccacggcctgtttgaggacccccacgtgcctttccacgtccggtgtgagaggagggattcgaaggtggaagtcattgagctgcaggacgtggaatgcgaggagaggccccggggaagcagctccaactgaggtgagtgccactgacaagggcagccaagggacctagagccaggcaaagaggaggacaaggttctcctggggttctcggcatccccgaggggctgtggcgctcgggcacatcccacgctggaccccagtgaccttttatccccagagcaaggctgatgtgtccaagctttgtcatccttggggaaccagtccagctccacactgctctcttcccccactgctaacctgcggagggtcggtgcagcgccacaaggacacaaacagcaccaccttttaccaatatttgccagtctttatggaggtgcatgccacagcgaattggtcacatgggaacgcatccgtgtaaccagcccccagatgaagggagaggtcacaagcagcccccagggacacctcaggcccacaccccactctcgtgatttctaataccaaggttactgctgcctgcttttgtactttataaatacggacttgcacacctcttactctgttcaacttccttttttgcttccttttaaagggtgattaaaatctgaagcaaagaggccaaagattggaaaccccccacccccacctctttccagaactgcttgaagagaactggttggagttatggaaaagatgccctgtgccaggacagcagttcattgttactgtaaccgattgtattattttgttaaatatttctataaatatttaagagatgtacacatgtgtaatataggaaggaaggatgtaaagtggtatgatctggggcttctccactcctgccccagagtgtggaggccacagtggggcctctccgtatttgtgcattgggctccgtgccacaaccaagcttcattagtcttaaatttcagcatatgttgctgctgcttaaatattgtataatttacttgtataattctatgcaaatattgcttatgtaataggattattttgtaaaggtttctgtttaaaatattttaaatttgcatatcacaaccctgtggtagtatgaaatgttactgttaactttcaaacacgctatgcgtgataatttttttgtttaatgagcagatatgaagaaagcacgttaatcctggtggcttctctaggtgtcgttgtgtgcggtcctcttgtttggctgtgcgtgtgaacacgtgtgtgagttcaccatgtactgtactgtgattttttttttgtcttgttttgtttctctacactgtctgtaacctgtagtaggctctgacctagtcaggctggaagcgtcaggatatcttttcttcgtgctggtgagggctggccctaaacatccacctaatcctttcaaatcagcccggcaaaagctagactctcctcgtgtctacggcatctcttatgatcattggctgccatccaggaccccaatttgtgcttcagggggataatctccttctctcggatcattgtgatggatgctggaacctcagggtatggagctcacatcagttcatcatggtgggtgttagagaattcggtgacatgcctagtgctgagccttggctgggccatgagagtctgtatactctaaaaagcatgcagcatggtgcccctcttctgaccaacacacacacgacccctcccccaacacccccaaattcaagagtggatgtggccctgtcacaggtagaaaaacctatttagttaattctttcttggcccacagtctcccagaaatgatgttttgagtccctatagtttaaactccctctcttaaatggagcagctggttgaggctttctagatctgtttgcatcttctttaaaactaagtggtgagcatgcattgtggtgtagaggcaggcattatgtaggataagagctccggggggattcttcatgcaccagtgtttagggtacgtgcttcctaagtaaatccaaacattgtctccatcctccccgtcattagtgctctttcaatgtgatgtgggaaagcaggaggatggacacaccccactgaaagatgtaggcaggggcaggtctctcaaccaggcatatttttaaaagttgcttctgtactggttctcttcttttgctctgaggtgtgggctccctcatctcgtaaccagagaccagcacatgtcagggaagcacccagtgtcggctccccatccaaatccacaccagcaccttgttacagacaagaagtcagaggaaagggcggggtccctgcagggctgaagcctaagctactgtgaggcgctcacgagtggcagctcctgttactcccttttaaattacctgggaaatcttaacagaaaggtaatgggcccccagaaatacccacagcatagtgacctcagaccctgatactcaccacaaaacttttaagatgctgattgggagccgcttgtggctgctgggtgtgtgtgtgtgtgtgtgcgtgcgtgcgtgtgtgtgtgtctctgctggggaccctggccacccccctgctgctgtcttggtgcctgtcacccacatggtctgccatcctaacacccagctctgctcagaaaacgtcctgcgtggaggagggatgatgcagaattctgaagtcgacttccctctggctcctggcgtgccctcgctcccttcctgagcccagctcgtgttgcgccggaggctgcgcggcccctgatttctgcatggtgtagaactttctccaatagtcacattggcaaagggagaactggggtgggcggggggtggggctggcagggaattagaatttctctctctcttttaatagttttattttgtctgtcctgtttgttcatttggatgttttaatttttaaaaaaaaaaaaactttgctgatatttataattttgtatcataagaatgttttcctctacagtatttgtcatgccagtttataacaaaaaaaaatgcagggattttatttctattggaaacattacagctatgttttacttttggacagaatttttatttgtatagagtgcttactaatgttaaatagttcagagtatataacatttacattaaggactcatggtaggttttagggtaaggagtttaaaggaaataaatattcaaactgggtctcattgccaattttggtggaaatgagtttgtgtcatttcaattacaaagataaaagtatgccatataatttatttatatgaagatttatttttgtagtgtacatagtagtcatcaagtcttttgacagaagtatatttttaaagaatttatatgtgatgaatccataatgtctggaactttgctgagacatgagtgggcacagttttcattgtaaattacagcaaggaaagaaaatgtttaacagtgttaagagagtcagagcagagtggatattcatgcgattatgaagtgtttattagttaccattggcgacctagcatgcttctcatttcaaaccttggaaggtgaaaatgtacaaactctctaaataattaatgttcaaacactgatagaaattctaacatgaataaaaaataatataacttgttggttatatctttgtttgtagaatgctttttttctttaaaatacttgggagagacagttagtgttggagccatcagaaactgttgtttcatcttgctgaccttgtgacactcttcttttttgctctatctgatggagagagttttaggttttcctcctttttgttttgtataaatagtgggtataagcatagctctgttacatggatgtattacaaagtgggggctgagcttttagtgtgatcatcacccaaatagtgtacattgtacccattaattaatttcttatcacctgaccctatttttgttttctcataccaagaaacttcctaagttaaccatcaaaattagtccttctgtcatctctcttagcatacttatttcccttatgtgatgcctaataatgagggaacataaataaagccaaattcaaagat
